(19) United States
(12) Patent Application Publication
(10) Pub. No.: US 2021/0222171 A1
(43) Pub. Date: Jul. 22, 2021

(54) CRISPR/CAS9 SYSTEMS, AND METHODS OF USE THEREOF

(71) Applicant: AVELLINO LAB USA, INC., Menlo Park, CA (US)

(72) Inventors: Tara MOORE, Ballyclare (GB); Andrew NESBIT, Coleraine (GB); Kathleen CHRISTIE, Boston, MA (US)

(21) Appl. No.: 17/187,666

(22) Filed: Feb. 26, 2021

Related U.S. Application Data
(63) Continuation-in-part of application No. 16/326,908, filed on Feb. 20, 2019.
Application No. 16/326,908 is a continuation of application No. PCT/US2019/048240, filed on Aug. 27, 2019.
(60) Provisional application No. 62/377,586, filed on Aug. 20, 2016.
(60) Provisional application No. 62/462,808, filed on Feb. 23, 2017.
(60) Provisional application No. 62/501,750, filed on May 5, 2017.
(60) Provisional application No. 62/723,450, filed on Aug. 27, 2018.

(51) Int. Cl. C12N 15/113; C12N 9/22

(52) U.S. Cl. CPC C12N 15/113; C12N 2310/20; C12N 9/22

(57) ABSTRACT

The present disclosure relates to Clustered Regularly Interspaced Short Palindromic Repeats (CRISPR)/CRISPR associate protein 9 (Cas9) systems, and methods of use thereof for gene editing.

### RELATED APPLICATIONS

[0001] This application is a continuation-in-part of U.S. patent application Ser. No. 16/326,908 filed Feb. 20, 2019, which is a national stage application under 35 U.S.C. 371 of the international application No. PCT/US2017/047861 filed Aug. 21, 2017, which claims priority to U.S. Provisional Patent Application No. 62/377,586 filed Aug. 20, 2016, U.S. Provisional Patent Application No. 62/462,808 filed Feb. 23, 2017, and U.S. Provisional Patent Application No. 62/501,750 filed May 5, 2017, all of which are incorporated by reference herein in their entireties. This application is a continuation application of the international application No. PCT/US2019/048240 filed Aug. 27, 2019, which claims priority to U.S. Provisional Patent Application No. 62/723,450 filed Aug. 27, 2018, both of which are incorporated by reference herein in their entireties.

### SEQUENCE LISTING SUBMISSION VIA EFS-WEB

[0002] A computer readable text file, entitled “SequenceListing.txt,” created on or about Feb. 26, 2021 with a file size of about 1,154 KB contains the sequence listing for this application and is hereby incorporated by reference in its entirety.

### FIELD OF THE INVENTION

[0003] The present disclosure relates to Clustered Regularly Interspaced Short Palindromic Repeats (CRISPR)/CRISPR associated protein 9 (Cas9) systems, and methods of use thereof for gene editing or preventing, ameliorating or treating a disease associated with a gene mutation or single nucleotide polymorphism (SNP) in a subject.

### BACKGROUND OF THE INVENTION

[0004] The majority of corneal dystrophies are inherited in an autosomal dominant fashion with a dominant-negative pathomechanism. For some genes, for example TGFBI and KRT12, it has been shown that they are haplosufficient; meaning one functional copy of the gene is sufficient to maintain normal function. By using siRNA that specifically targets the mutant allele, it is possible to overcome the dominant-negative effect of the mutant protein and restore normal function to cells in vitro. Whereas the effects of siRNA are transient, lasting only as long as the siRNA is present in the cell at high enough concentrations; CRISPR/Cas9 gene editing offers the opportunity to permanently modify the mutant allele.

[0005] The discovery of a simple endogenous bacterial system for catalytically cleaving double-stranded DNA has revolutionized the field of therapeutic gene editing. The Type II Clustered Regularly Interspaced Short Palindromic Repeats (CRISPR)/CRISPR associated protein 9 (Cas9) is a programmable RNA guided endonuclease, which has recently been shown to be effective at gene editing in mammalian cells (Hsu P D, Lander E S, Zhang F. Development and applications of CRISPR-Cas9 for genome engineering. Cell 2014; 157: 1262-1278). This highly specific and efficient RNA-guided DNA endonuclease may be of therapeutic importance in a range of genetic diseases. The CRISPR/Cas9 system relies on a single catalytic protein, Cas9 that is guided to a specific DNA sequence by 2 RNA molecules; the tracrRNA and the crRNA (Hsu P D, Lander E S, Zhang F. Development and applications of CRISPR-Cas9 for genome engineering. Cell 2014; 157: 1262-1278). Combination of the tracrRNA/crRNA into a single guide RNA molecule (sgRNA) (Shalem O, Sanjana N E, Hartenian E, Shi X, Scott D A, Mikkelsen T S et al. Genome-scale CRISPR-Cas9 knockout screening in human cells. Science 2014; 343: 84-87; Wang T, Wei J J, Sabatini D M, Lander E S. Genetic screens in human cells using the CRISPR-Cas9 system. Science 2014; 343: 80-84) has led to the rapid development of gene editing tools potentially specific for any target within the genome. Through the substitution of a nucleotide sequence within the sgRNA, to one complimentary to a chosen target, a highly specific system may be generated in a matter of days. One caveat of this system is that the endonuclease requires a protospacer adjacent motif (PAM), located immediately at the 3′ end of the sgRNA binding site. This PAM sequence is an invariant part of the DNA target but not present in the sgRNA, while its absence at the 3′ end of the genomic target sequence results in the inability of the Cas9 to cleave the DNA target (Westra E R, Semenova E, Datsenko K A, Jackson R N, Wiedenheft B, Severinov K et al. Type I-E CRISPR-cas systems discriminate target from non-target DNA through base pairing-independent PAM recognition. PLoS Genet 2013; 9: e1003742). This distinction is important as the mutation directly in a PAM-specific approach, or nearby SNPs may be targeted. One SNP allele will represent a PAM site, while the other allele does not. This allows us to discriminate between the two chromosomes.

### SUMMARY OF THE INVENTION

[0006] In one aspect, the present disclosure describes the potential of utilizing the PAM-generating mutations in introns of a disease-causing gene. For example, the PAM-generating mutations are in adjacent introns of a gene having a disease-causing mutation, and the disease-causing mutation is in exon in between the adjacent introns.

[0007] By utilizing guide sequences that bind adjacent to the PAM sequences in the introns, Cas9 nuclease may cleave a gene at two intronic sites, between which an exon containing a disease-causing mutation exists, thereby eliminating the disease-causing exon and knocking out the mutated allele. In another aspect, the CRISPR/Cas9 system utilizing the PAM-generating mutations or SNPs in introns may be used to treat corneal dystrophies, for example, including corneal dystrophy associated with R124H granular corneal dystrophy type 2 mutation.

[0008] In one aspect, the present disclosure is related to an sgRNA pair designed for CRISPR/Cas9 system. For example, the sgRNA pair may comprise (i) a first sgRNA comprising (a) a first crRNA sequence for a first protospacer adjacent motif (PAM) generating mutation or single-nucleotide polymorphism (SNP) in a first intron at 3′-end side of an exon comprising a disease-causing mutation or SNP in cis, and (b) a tracrRNA sequence, in which the first crRNA sequence and the tracrRNA sequence do not naturally occur together; and (ii) a second sgRNA comprising (a) a second crRNA guide sequence for a second PAM generating mutation or SNP in a second intron at 5′-end side of the exon comprising the disease-causing mutation or SNP in cis; (b) a tracrRNA sequence, in which the second crRNA sequence and the tracrRNA sequence do not naturally occur together. In some embodiments, the CRISPR/Cas9 system is for preventing, ameliorating or treating corneal dystrophies. In additional embodiments, the exon and the first and second introns are of TGFBI gene. In further embodiments, at least one of the first and second crRNA sequences comprises a nucleotide sequence selected from the group consisting of guide sequences shown in Table 3.

[0009] In one aspect, the present disclosure is related to an engineered Clustered Regularly Interspaced Short Palindromic Repeats (CRISPR)/CRISPR associate protein 9 (Cas9) system comprising at least one vector comprising a nucleotide molecule encoding Cas9 nuclease and the sgRNA pair described herein, wherein the Cas9 nuclease and said sgRNA pair in the vector do not naturally occur together. In some embodiments, the at least one vector includes a single-stranded oligonucleotide containing (i) a first portion corresponding to (or complementary to) the sequence of the first intron on the 3′-end side of a cleavage site associated with the first PAM and (ii) a second portion corresponding to (or complementary to) the sequence of the second intron on the 5′-end side of a cleavage site associated with the second PAM. In some embodiments, the first portion has 50 nucleotides and the second portion has 50 nucleotides. In some embodiments, the first portion is adjacent to the second portion.

[0010] In one aspect, the present disclosure is related to methods of preventing, ameliorating, or treating corneal dystrophy, the method comprising administering to the subject an engineered CRISPR/Cas9 system comprising at least one vector comprising at least two different CRISPR targeting RNA (crRNA) sequences or single guide RNA (sgRNA) sequences. In one aspect, the present disclosure is related to methods of preventing, ameliorating, or treating corneal dystrophy in a subject, comprising administering to the subject an engineered CRISPR/Cas9 system comprising at least one vector comprising (i) a nucleotide molecule encoding Cas9 nuclease; (ii) a first sgRNA comprising a first crRNA sequence that hybridizes to a nucleotide sequence complementary to a first target sequence, the first target sequence being adjacent to the 5′-end of a first protospacer adjacent motif (PAM) in a first intron at the 3′-end side of an exon comprising a disease-causing mutation or SNP in cis, wherein the first target sequence or the first PAM comprises a first ancestral variation or SNP site; and (iii) a second sgRNA comprising a second crRNA sequence that hybridizes to a nucleotide sequence complementary to a second target sequence, the second target sequence being adjacent to the 5′-end of a second PAM in a second intron at the 5′ side of the exon comprising the disease-causing mutation or SNP in cis, wherein the second target sequence or the second PAM comprises a second ancestral variation or SNP site, wherein the at least one vector does not have a nucleotide molecule encoding Cas9 nuclease and a sgRNA sequence that naturally occur together. In some embodiments, the corneal dystrophy is associated with R124H granular corneal dystrophy type 2 mutation.

[0011] In some embodiments, the first PAM comprises the first ancestral variation or SNP site and/or the second PAM comprises the second ancestral variation or SNP site. In some embodiments, the first crRNA sequence comprises the first target sequence, and the second crRNA sequence comprises the second target sequence. In further embodiments, the first crRNA sequence is from 17 to 24 nucleotide long; and/or the second crRNA sequence is from 17 to 24 nucleotide long.

[0012] In some embodiments, the first and/or second PAMs and the Cas9 nuclease are from Streptococcus or Staphylococcus. In additional embodiments, the first and second PAMs are both from Streptococcus or Staphylococcus. In some embodiments, each of the first and second PAMs independently consists of NGG or NNGRRT, wherein N is any of A, T, G, and C, and R is A or G. In some embodiments, the administration comprises injecting the engineered CRISPR/Cas9 system into the subject. In additional embodiments, the administering comprises introducing the engineered CRISPR/Cas9 system into a cell containing and expressing a DNA molecule having the target sequence.

[0013] In some embodiments, the disease is associated with the SNP; the first target sequence or the first PAM comprises the first ancestral SNP site; and/or the second target sequence or the second PAM comprises the second ancestral SNP site. In additional embodiments, the target sequence or the PAM comprises a plurality of mutation or SNP sites. In some embodiments, the subject is human.

[0014] In some embodiments, the methods described herein further comprises, prior to administering to the subject the engineered CRISPR/Cas9 system, obtaining genomic or sequence information of the subject; and selecting the first crRNA sequence and/or the second crRNA sequence based on the genomic or sequence information of the subject. In additional embodiments, the genomic or sequence information of the subject includes whole or partial genome sequence information of the subject.

[0015] In some embodiments, the first crRNA sequence hybridizes to the nucleotide sequence so that the Cas9 nuclease cleaves at a first cleaving site that is adjacent to the first ancestral variation or SNP site; and/or the second crRNA sequence hybridizes to the nucleotide sequence so that the Cas9 nuclease cleaves at a second cleaving site that is adjacent to the second ancestral variation or SNP site. In additional embodiments, the first crRNA sequence hybridizes to the nucleotide sequence so that the Cas9 nuclease cleaves only at the first cleaving site that is adjacent to the first ancestral variation or SNP site; and/or the second crRNA sequence hybridizes to the nucleotide sequence so that the Cas9 nuclease cleaves only at the second cleaving site that is adjacent to the second ancestral variation or SNP site. In further embodiments, the first crRNA sequence is configured to reduce cleaving of the genome of the subject at a site other than a first cleaving site compared to other crRNA sequences hybridizing to the nucleotide sequence complementary to the first target sequences; and/or the second crRNA sequence is configured to reduce cleaving of the genome of the subject at a site other than a second cleaving site compared to other crRNA sequences hybridizing to the nucleotide sequence complementary to the second target sequences. In yet further embodiments, the first crRNA sequence is configured to reduce cleaving of a gene, in trans, that corresponds to a gene causing the disease in cis compared to other crRNA sequences hybridizing to the nucleotide sequence complementary to the first target sequences; and/or the second crRNA sequence is configured to reduce cleaving of a gene, in trans, that corresponds to the gene causing the disease in cis compared to other crRNA sequences hybridizing to the nucleotide sequence complementary to the second target sequences.

[0016] In some embodiments, the selected first crRNA sequence is configured to cause cleaving at a first cleaving site, within genome of the subject, that is adjacent to the first ancestral variation or SNP site; and/or the selected second crRNA sequence is configured to cause cleaving at a second cleaving site, within the genome of the subject, that is adjacent to the second ancestral variation or SNP site. In additional embodiments, the selected first crRNA sequence is configured to cause cleaving only at the first cleaving site; and/or the selected second crRNA sequence is configured to cause cleaving only at the second cleaving site. In further embodiments, the first crRNA sequence hybridizes to the nucleotide sequence complementary to the first target sequence in trans with the disease-causing mutation or SNP, said first target sequence in trans not being adjacent to the 5′-end of a PAM; and/or the second crRNA sequence hybridizes to the nucleotide sequence complementary to the second target sequence in trans with the disease-causing mutation or SNP, said second target sequence not being adjacent to the 5′-end of a PAM.

### BRIEF DESCRIPTION OF THE DRAWINGS

[0017] FIG. 1 illustrates an example of a sgRNA sequence, nucleotide and amino acid sequences of Cas9 nuclease from Streptococcus pyogenes (Spy) and Staphylococcus aureus (Sau).

[0018] FIG. 2 illustrates an example of a dual-cut approach using intronic PAM sites. Two separate guides are introduced, and Cas9 generates a double stranded break (DSB) at two sites. Repair of this doubly cut region will result in an excision of the region between the two breaks. The deletion encompasses the exonic coding region of the gene shown by the yellow boxes in this figure.

[0019] FIG. 3 illustrates an embodiment in which a sgRNA utilizing a flanking SNP within the PAM site is designed in the first intron. Additionally, a sgRNA common to both the wild-type and mutant allele is designed in the second intron. In the wild-type allele the single sgRNA causes NHEJ in the second intron, which may have no functional effect. However, in the mutant allele, the sgRNA utilizing the flanking SNP derived PAM and the common sgRNA result in a large deletion that results in a knockout of the mutant allele.

[0020] FIG. 4 illustrates all SNPs in TGFBI with a MAF of >10% that generate a novel PAM. The numbered boxes indicate the exons within TGFBI. The hotspots in TGFBI, where multiple disease-causing mutations are found, are shown by the red boxes. The blue arrows indicate the position of a SNP that generates a novel PAM. The novel PAM is shown for each arrow, with the required variant highlighted in red.

[0021] FIG. 5 depicts experimental results from using an exemplary lymphocyte cell line derived from a patient with a R124H granular corneal dystrophy type 2 mutation that was nucleofected with CRISPR/Cas9 and sgRNA. The guide utilized the novel PAM that is generated by the rs3805700 SNP. This PAM is present on the same chromosome as the patients R124H mutation but does not exist on the wild-type chromosome. Following cell sorting, single clones were isolated to determine whether indels had occurred. Six of the single clones had the unedited wild-type chromosome, indicating stringent allele-specificity of this guide. Four of the isolated clones had the mutant chromosome, and three of these exhibited edits indicating a 75% editing efficiency of the mutant chromosome. Two of the three clones exhibited indels that are frame-shifting. Therefore, at least 66.66% of the edits induced gene disruption.

[0022] FIG. 6 shows the results from a dual-guide approach.

[0023] FIG. 7, on the right, illustrates that using the original clonal isolation of single alleles, a 565 bp deletion encompassing both PAM sites was confirmed. The deletion is shown in red with the PAM sites highlighted in blue. On the left, FIG. 7 also illustrates the two guides cutting at their target sites, the region between these cuts being excised upon repair, and the genomic region after repair.

[0024] FIGS. 8-23 illustrate exemplary common guides in intronic regions of TGFBI gene.

[0025] FIG. 24 illustrates (a) locations of exemplary nine SNPs in intronic PAM sites to be used in certain dual-cut examples described herein, (b) in vitro experimental results of using the exemplary nine SNPs, and (c) experimental results of using the exemplary nine SNPs in lymphocyte cell line.

[0026] FIG. 25 describes experimental results from transfecting exemplary complexes of Cas9 and guides based on the nine SNPs into a lymphocyte cell line generated from a R124H GCD2 corneal dystrophy patient.

[0027] FIG. 26 depicts locations of additional exemplary common intronic guides, CI-1 through CI-4. These guides are configured to cause cleavage of both alleles (by Cas9). As described herein, any of these guides can be used alongside an allele-specific ASNIP guide to cause a dual-cut that has a functional effect when both cuts happen for any particular allele.

[0028] FIG. 27 depicts six exemplary different dual combinations tested and their associated deletion.

[0029] FIGS. 28-33 illustrate experimental results from transfecting exemplary complexes of guides of FIG. 27 and Cas9 into R124H patient-derived cells.

[0030] FIG. 34 illustrates that addition of the 50-50 bp ssODN improved the efficiency of the dual cut.

[0031] FIG. 35 illustrates that, in a wild-type (WT) allele, a single cut and a repair in an intronic region have no functional effect.

[0032] FIG. 36 shows experimental results confirming that the dual-cut indeed occurred using the exemplary complexes.

[0033] FIG. 37 illustrates example SNPs containing a PAM on only one allele.

[0034] FIG. 38 illustrates example SNPs associated with a PAM on only one allele that lie in cis with the patient's R124H mutations.

[0035] FIG. 39 illustrates example guide pairs used in an experiment.

[0036] FIG. 40 illustrates example guide pairs with large distances between the two guides.

[0037] FIG. 41 illustrates example guide pairs with smaller distances between the two guides.

[0038] FIG. 42 illustrates example guide pairs used in an experiment.

### DETAILED DESCRIPTION OF THE INVENTION

[0039] As used throughout, ranges are used as shorthand for describing each and every value that is within the range. Any value within the range can be selected as the terminus of the range. In addition, all references cited herein are hereby incorporated by reference in their entireties for all purposes. In the event of a conflict in a definition in the present disclosure and that of a cited reference, the present disclosure controls.

[0040] In one aspect, the present disclosure is related to an sgRNA pair designed for CRISPR/Cas9 system. For example, the sgRNA pair may comprise (i) a first sgRNA comprising (a) a first crRNA sequence for a first protospacer adjacent motif (PAM) generating mutation or single-nucleotide polymorphism (SNP) in a first intron at 3′-end side of an exon comprising a disease-causing mutation or SNP in cis, and (b) a tracrRNA sequence, in which the first crRNA sequence and the tracrRNA sequence do not naturally occur together; and (ii) a second sgRNA comprising (a) a second crRNA guide sequence for a second PAM generating mutation or SNP in a second intron at 5′-end side of the exon comprising the disease-causing mutation or SNP in cis; (b) a tracrRNA sequence, in which the second crRNA sequence and the tracrRNA sequence do not naturally occur together. In some embodiments, the CRISPR/Cas9 system is for preventing, ameliorating or treating corneal dystrophies. In some embodiments, the corneal dystrophy is associated with R124H granular corneal dystrophy type 2 mutation. In additional embodiments, the exon and the first and second introns are of TGFBI gene. In further embodiments, at least one of the first and second crRNA sequences comprises a nucleotide sequence selected from the group consisting of guide sequences shown in Table 3.

[0041] The term “crRNA” may refer to a guide sequence that may be a part of an sgRNA in an CRISPR/Cas9 system. In some embodiments, at least one of the first and second crRNA sequences described herein comprises a nucleotide sequence selected from the group consisting of sequences listed in FIGS. 8-23; and/or at least one of the first and second crRNA sequences comprises a nucleotide sequence selected from the group consisting of sequences listed in Table 2. The term, “sgRNA” refers to a single guide RNA containing (i) a guide sequence (crRNA sequence) and (ii) a Cas9 nuclease-recruiting sequence (tracrRNA). The crRNA sequence may be a sequence that is homologous to a region in your gene of interest and may direct Cas9 nuclease activity. The crRNA sequence and tracrRNA sequence may not naturally occur together. The sgRNA may be delivered as RNA or by transforming with a plasmid with the sgRNA-coding sequence (sgRNA gene) under a promoter. The tracrRNA sequence may be any sequence for tracrRNA for CRISPR/Cas9 system known in the art.

[0042] In some embodiments, the crRNA hybridizes to at least a part of a target sequence (e.g., target genome sequence), and the crRNA may have a complementary sequence to the target sequence. In some embodiments, the target sequence herein is a first target sequence that hybridizes to a second target sequence adjacent to a PAM site described herein. In some embodiments, the crRNA may comprise the first target sequence or the second target sequence. In additional embodiments, the first and second target sequences are located in introns of a target gene. “Complementarity” refers to the ability of a nucleic acid to form hydrogen bond(s) with another nucleic acid sequence by either traditional Watson-Crick or other non-traditional types. A percent complementarity indicates the percentage of residues in a nucleic acid molecule which can form hydrogen bonds (e.g., Watson-Crick base pairing) with a second nucleic acid sequence (e.g., 5, 6, 7, 8, 9, 10 out of 10 being 50%, 60%, 70%, 80%, 90%, and 100% complementary), “Perfectly complementary” means that all the contiguous residues of a nucleic acid sequence will hydrogen bond with the same number of contiguous residues in a second nucleic acid sequence. “Substantially complementary” as used herein refers to a degree of complementarity that is at least about 60%, 65%, 70%, 75%, 80%, 85%, 90%, 95%, 97%, 98%, 99%, or 100% over a region of 8, 9, 10, 11, 12, 13, 14, 15, 16, 17, 18, 19, 20, 21, 22, 23, 24, 25, 30, 35, 40, 45, 50, or more nucleotides, or refers to two nucleic acids that hybridize under stringent conditions. As used herein, “stringent conditions” for hybridization refer to conditions under which a nucleic acid having complementarity to a target sequence predominantly hybridizes with the target sequence, and substantially does not hybridize to non-target sequences. Stringent conditions are generally sequence-dependent, and vary depending on a number of factors. In general, the longer the sequence, the higher the temperature at which the sequence specifically hybridizes to its target sequence. Non-limiting examples of stringent conditions are described in detail in Tijssen (1993), Laboratory Techniques In Biochemistry And Molecular Biology-Hybridization With Nucleic Acid Probes Part 1, Second Chapter “Overview of principles of hybridization and the strategy of nucleic acid probe assay”, Elsevier, N.Y. “Hybridization” refers to a reaction in which one or more polynucleotides react to form a complex that is stabilized via hydrogen bonding between the bases of the nucleotide residues. The hydrogen bonding may occur by Watson Crick base pairing, Hoogstein binding, or in any other sequence specific manner. The complex may comprise two strands forming a duplex structure, three or more strands forming a multi stranded complex, a single self-hybridizing strand, or any combination of these. A hybridization reaction may constitute a step in a more extensive process, such as the initiation of PCR, or the cleavage of a polynucleotide by an enzyme. A sequence capable of hybridizing with a given sequence is referred to as the “complement” of the given sequence. In additional embodiments, the crRNA or the guide sequence is about 17, 18, 19, 20, 21, 22, 23 or 24 nucleotide long. As used herein, the term “about” may refer to a range of values that are similar to the stated reference value. In certain embodiments, the term “about” refers to a range of values that fall within 15, 10, 9, 8, 7, 6, 5, 4, 3, 2, 1 percent or less of the stated reference value.

[0043] In one aspect, the present disclosure is related to methods of preventing, ameliorating, or treating a disease associated with a gene mutation or single-nucleotide polymorphism (SNP) in a subject, comprising administering to the subject an engineered CRISPR/Cas9 system comprising at least one vector comprising (i) a nucleotide molecule encoding Cas9 nuclease; (ii) a first sgRNA comprising a first CRISPR targeting RNA (crRNA) sequence that hybridizes to a nucleotide sequence complementary to a first target sequence, the first target sequence being adjacent to the 5′-end of a first protospacer adjacent motif (PAM) in a first intron at 3′-end side of an exon comprising a disease-causing mutation or SNP in cis, wherein the first target sequence or the first PAM comprises a first ancestral variation or SNP site; and (iii) a second sgRNA comprising a second crRNA sequence that hybridizes to a nucleotide sequence complementary to a second target sequence, the second target sequence being adjacent to the 5′-end of a second PAM in a second intron at 5′-end side of the exon comprising the disease-causing mutation or SNP in cis, wherein the second target sequence or the second PAM comprises a second ancestral variation or SNP site, wherein at least one vector does not have a nucleotide molecule encoding Cas9 nuclease and a crRNA sequence that naturally occur together. In another aspect, the present disclosure is related to methods of preventing, ameliorating, or treating a disease associated with a gene mutation or single-nucleotide polymorphism (SNP) in a subject comprising altering expression of the gene product of the subject by the methods described above, wherein the gene comprises a mutant or SNP mutant sequence. In some embodiments, the disease is associated with the SNP; the first target sequence or the first PAM comprises the first ancestral SNP site; and/or the second target sequence or the second PAM comprises the second ancestral SNP site. In additional embodiments, the target sequence comprises a plurality of mutation or SNP sites. In some embodiments, the subject is human. In some embodiments, the first crRNA sequence hybridizes to the nucleotide sequence so that the Cas9 nuclease cleaves at a first cleaving site that is adjacent to the first ancestral variation or SNP site; and/or the second crRNA sequence hybridizes to the nucleotide sequence so that the Cas9 nuclease cleaves at a second cleaving site that is adjacent to the second ancestral variation or SNP site. In additional embodiments, the first crRNA sequence hybridizes to the nucleotide sequence so that the Cas9 nuclease cleaves only at the first cleaving site; and/or the second crRNA sequence hybridizes to the nucleotide sequence so that the Cas9 nuclease cleaves only at the second cleaving site.

[0044] As described herein, being “in cis” with the disease-causing mutation or SNP refers to being on the same molecule of DNA or chromosome as the disease-causing mutation, and being “in trans” with the disease-causing mutation or SNP refers to being on a different molecule of DNA or chromosome as the disease-causing mutation or SNP. In some embodiments, the first crRNA sequence hybridizes to the nucleotide sequence complementary to the first target sequence in trans with the disease-causing mutation or SNP, said first target sequence not being adjacent to the 5′-end of a PAM; and/or the second crRNA sequence hybridizes to the nucleotide sequence complementary to the second target sequence in trans with the disease-causing mutation or SNP, said second target sequence not being adjacent to the 5′-end of a PAM. In the absence of the PAM adjacent to the first and/or second target sequences, the first and/or the second target sequences in trans with the disease-causing mutation or SNP may remain intact without any cleavage (e.g., the Cas9 nuclease does not cleave the first and/or the second target sequences in trans with the disease-causing mutation or SNP). This approach may permit expression of a gene that is in trans with the disease-causing mutation or SNP and does not include a disease-causing mutation or SNP. This approach may also reduce or eliminate any adverse impacts associated with knocking out both the gene that includes the disease-causing mutation or SNP and the gene that does not include the disease-causing mutation or SNP in a subject. In additional embodiments, the first crRNA sequence hybridizes to the nucleotide sequence complementary to the first target sequence in trans with the disease-causing mutation or SNP, said first target sequence not being adjacent to the 5′-end of a PAM; and the second crRNA sequence hybridizes to the nucleotide sequence complementary to the second target sequence in trans with the disease-causing mutation or SNP, said second target sequence being adjacent to the 5′-end of a PAM. In the absence of the PAM adjacent to the first target sequence, the first target sequence in trans with the disease-causing mutation or SNP may remain intact without any cleavage while the second target sequence in trans with the disease-causing mutation or SNP may be cleaved (e.g., the Cas9 nuclease cleaves the first target sequence in trans with the disease-causing mutation or SNP but does not cleave the second target sequence in trans with the disease-causing mutation or SNP). In further embodiments, the first crRNA sequence hybridizes to the nucleotide sequence complementary to the first target sequence in trans with the disease-causing mutation or SNP, said first target sequence being adjacent to the 5′-end of a PAM; and the second crRNA sequence hybridizes to the nucleotide sequence complementary to the second target sequence in trans with the disease-causing mutation or SNP, said second target sequence not being adjacent to the 5′-end of a PAM. In the absence of the PAM adjacent to the second target sequence, the second target sequence in trans with the disease-causing mutation or SNP may remain intact without any cleavage while the first target sequence in trans with the disease-causing mutation or SNP is cleaved (e.g., the Cas9 nuclease cleaves the second target sequence in trans with the disease-causing mutation or SNP but does not cleave the first target sequence in trans with the disease-causing mutation or SNP). Said “nucleotide sequence complementary to the first target sequence in trans with the disease-causing mutation or SNP” herein has the identical nucleotide sequence as the nucleotide sequence complementary to the first target sequence in cis with the disease-causing mutation or SNP. Said “nucleotide sequence complementary to the first target sequence in trans with the disease-causing mutation or SNP” and said “the first target sequence in trans with the disease-causing mutation or SNP,” however, may be located on a different molecule of DNA or chromosome where the same disease-causing mutation or SNP is absent (thus are in trans with the disease-causing mutation or SNP). Similarly, said “nucleotide sequence complementary to the second target sequence in trans with the disease-causing mutation or SNP” herein has the identical nucleotide sequence as the nucleotide sequence complementary to the second target sequence in cis with the disease-causing mutation or SNP. Said “nucleotide sequence complementary to the second target sequence in trans with the disease-causing mutation or SNP” and said “the second target sequence in trans with the disease-causing mutation or SNP,” however, may be located on a different molecule of DNA or chromosome where the disease-causing mutation or SNP is absent (thus are in trans with the disease-causing mutation or SNP).

[0045] In some embodiments, the engineered CRISPR/Cas9 system described herein may comprise at least one vector comprising (i) a nucleotide molecule encoding Cas9 nuclease described herein, and (ii) a plurality of sgRNA targeting intronic sites surrounding one or more exons containing a disease-associate mutation or SNP of interest as described herein. The sgRNA may comprise a target sequence adjacent to the 5′-end of a protospacer adjacent motif (PAM), and/or hybridize to a first target sequence complementary to a second target sequence adjacent to the 5′ end of the PAM. The target sequence or the PAM may comprise the ancestral variation or SNP in an intronic site. In additional embodiments, the ancestral variation or SNP in the intronic site does not cause a disease. In some embodiments, sgRNA may comprise a target sequence adjacent to a PAM site located in the flanking intron that is common to both wild-type and mutant alleles in tandem with a sgRNA adjacent to a PAM site that is specific to the mutant allele. In some embodiments, the Cas9 nuclease and the sgRNA do not naturally occur together. The sequence of this PAM site is specific to the Cas9 nuclease being used. In additional embodiments, the PAM comprises the mutation or SNP site. In yet additional embodiments, the PAM consists of a PAM selected from the group consisting of NGG and NNGRRT, wherein N is any of A, T, G, and C, and R is A or G.

[0046] In some embodiments, the disease-causing mutation or SNP is in an exon of a gene associated with the disease, and the first and second PAMs are in different introns surrounding one or more exons containing the disease-causing mutation or SNP. This may be called a dual-cut approach. As shown in FIGS. 2 and 3, first and second CRISPR targeting RNA (crRNA) sequences hybridize to nucleotide sequences complementary to first and second target sequences, the first target sequence being adjacent to the 5′-end of a first protospacer adjacent motif (PAM) in a first intron at 3′-end side of an exon comprising a disease-causing mutation or SNP in cis, and the second target sequence being adjacent to the 5′-end of a first protospacer adjacent motif (PAM) in a second intron at 5′-end side of the exon comprising the disease-causing mutation or SNP in cis. Thus, the first and second PAMs are located on opposite sides of one or more exons containing the disease-causing mutation or SNP. As used herein, an “intron” means a section of DNA occurring between two adjacent exons within a gene which is removed during pre-mRNA splicing and does not code for any amino acids constituting the gene product. An “intronic site” is a site within an intron. An “exon” means a section of DNA occurring in a gene which codes for one or more amino acids in the gene product. For example, the constitutively spliced exon known so far has 6 nucleotides or more, and the alternatively spliced exon has 3 nucleotides or more, which is equivalent to 1 or 2 amino acids or more depending on the frame that the mRNA is read in. An “exonic site” is a site within an exon.

[0047] In some embodiments, the first PAM comprises the first mutation or SNP site and/or the second PAM comprises the second mutation or SNP site. In some embodiments, the first crRNA sequence comprises the first target sequence, and the second crRNA sequence comprises the second target sequence. In further embodiments, each of the first crRNA sequence and the second crRNA sequence may independent be from 14, 15, 16, 17, 18, 19, 20, 21, 22, 23, 24 or 25 to 20, 21, 22, 23, 24, 25, 26, 27, 28, 29 or 30 nucleotide long.

[0048] In some embodiments, the methods described herein further comprise identifying targetable mutations or SNPs on either side of disease-causing mutation or SNP to silence the disease-causing mutation or SNP. In some embodiments, a block of DNA is identified in a phased sequencing experiment. In some embodiments, the mutation or SNP of interest is not a suitable substrate for the CRISPR/Cas9 system, and identifying mutations or SNPs on both side of the disease-causing mutations or SNP that are suitable for CRISPR/Cas9 cleavage allows removal of a segment of DNA that includes the disease-causing mutations or SNP. In some embodiments, the read length may be increased so as to gain longer contiguous reads and a haplotype phased genome by using a technology described in Weisenfeld N I, Kumar V, Shah P, Church D M, Jaffe D B. Direct determination of diploid genome sequences. Genome research. 2017; 27(5):757-767, which is herein incorporated by reference in its entirety.

[0049] In some embodiments, the methods described herein further comprises, prior to administering to the subject the engineered CRISPR/Cas9 system, obtaining genomic or sequence information of the subject; and selecting the first crRNA sequence and/or the second crRNA sequence based on the genomic or sequence information of the subject. In additional embodiments, the genomic or sequence information of the subject includes whole or partial genome sequence information of the subject.

[0050] The human genome is diploid by nature; every chromosome with the exception of the X and Y chromosomes in males is inherited as a pair, one from the male and one from the female parent. When seeking stretches of contiguous DNA sequence larger than a few thousand base pairs, a determination of inheritance is crucial to understand from which parent these blocks of DNA originate. Longer read sequencing technologies have been utilized in attempts to produce a haplotype-resolved genome sequences, i.e. haplotype phasing. Thus, when investigating the genomic sequence of a particular stretch of DNA longer than 50 kbps, a haplotype phased sequence analysis may be utilized to determine which of the paired chromosomes carries the sequence of interest. Longer phased sequencing reads may be employed to determine whether the SNP of interest would be suitable as a target for the CRISPR/Cas9 gene editing system described herein.

[0051] In some embodiments, the selected first crRNA sequence is configured to cause cleaving at a first cleaving site, within genome of the subject, that is adjacent to the first ancestral variation or SNP site; and/or the selected second crRNA sequence is configured to cause cleaving at a second cleaving site, within the genome of the subject, that is adjacent to the second ancestral variation or SNP site. In additional embodiments, the selected first crRNA sequence is configured to cause cleaving only at the first cleaving site; and/or the selected second crRNA sequence is configured to cause cleaving only at the second cleaving site. In some embodiments, the selected first crRNA sequence hybridizes to the nucleotide sequence (in trans) complementary to the first target sequence in trans with the disease-causing mutation or SNP, said first target sequence not being adjacent to the 5′-end of a PAM; and/or the selected second crRNA sequence hybridizes to the nucleotide sequence (in trans) complementary to the second target sequence in trans with the disease-causing mutation or SNP, said second target sequence not being adjacent to the 5′-end of a PAM. In additional embodiments, the selected first crRNA sequence hybridizes to the nucleotide sequence (in trans) complementary to the first target sequence in trans with the disease-causing mutation or SNP, said first target sequence not being adjacent to the 5′-end of a PAM; and the selected second crRNA sequence hybridizes to the nucleotide sequence (in trans) complementary to the second target sequence in trans with the disease-causing mutation or SNP, said second target sequence being adjacent to the 5′-end of a PAM. In further embodiments, the selected first crRNA sequence hybridizes to the nucleotide sequence (in trans) complementary to the first target sequence in trans with the disease-causing mutation or SNP, said first target sequence being adjacent to the 5′-end of a PAM; and the selected second crRNA sequence hybridizes to the nucleotide sequence (in trans) complementary to the second target sequence in trans with the disease-causing mutation or SNP, said second target sequence not being adjacent to the 5′-end of a PAM.

[0052] In some embodiments, selecting the first crRNA sequence includes selecting a crRNA sequence that corresponds to the first target sequence in trans, said first target sequence in trans not being adjacent to the 5′-end of a PAM, and/or selecting the second crRNA sequence includes selecting a crRNA sequence that corresponds to the second target sequence in trans, said second target sequence in trans not being adjacent to the 5′-end of a PAM. In some embodiments, selecting the first crRNA sequence includes selecting a crRNA sequence that corresponds to the first target sequence in trans, said first target sequence in trans not being adjacent to the 5′-end of a PAM, and selecting the second crRNA sequence includes selecting a crRNA sequence that corresponds to the second target sequence in trans, said second target sequence in trans being adjacent to the 5′-end of a PAM. In some embodiments, selecting the first crRNA sequence includes selecting a crRNA sequence that corresponds to the first target sequence in trans, said first target sequence in trans being adjacent to the 5′-end of a PAM, and selecting the second crRNA sequence includes selecting a crRNA sequence that corresponds to the second target sequence in trans, said second target sequence in trans not being adjacent to the 5′-end of a PAM.

[0053] In some embodiments, the subjects that can be treated with the methods described herein include, but are not limited to, mammalian subjects such as a mouse, rat, dog, baboon, pig or human. In some embodiments, the subject is a human. The methods can be used to treat subjects at least 1 year, 2 years, 3 years, 5 years, 10 years, 15 years, 20 years, 25 years, 30 years, 35 years, 40 years, 45 years, 50 years, 55 years, 60 years, 65 years, 70 years, 75 years, 80 years, 85 years, 90 years, 95 years or 100 years of age. In some embodiments, the subject is treated for at least one, two, three, or four diseases. For example, a single or multiple crRNA or sgRNA may be designed to alter or delete nucleotides at more than 2, 3, 4, 5, 6, 7, 8, 9 or 10 and/or fewer than 20, 10, 9, 8, 7, 6, 5, 4 or 3 ancestral variation or SNP sites.

[0054] In some embodiments, the methods of preventing, ameliorating, or treating the disease in a subject may comprise administering to the subject an effective amount of the engineered CRISPR/Cas9 system described herein. The term “effective amount” or “therapeutically effective amount” refers to the amount of an agent that is sufficient to effect beneficial or desired results. The therapeutically effective amount may vary depending upon one or more of: the subject and disease condition being treated, the weight and age of the subject, the severity of the disease condition, the manner of administration and the like, which can readily be determined by one of ordinary skill in the art. The term also applies to a dose that will provide an image for detection by any one of the imaging methods described herein. The specific dose may vary depending on one or more of: the particular agent chosen, the dosing regimen to be followed, whether it is administered in combination with other compounds, timing of administration, the tissue to be imaged, and the physical delivery system in which it is carried.

[0055] In some embodiments, the administering comprises injecting the engineered CRISPR/Cas9 system into the subject. In additional embodiments, the administering comprises introducing the engineered CRISPR/Cas9 system into a cell containing and expressing a DNA molecule having the target sequence as described below.

[0056] In some embodiments, the methods of treating the disease provide a positive therapeutic response with respect to a disease or condition. By “positive therapeutic response” is intended an improvement in the disease or condition, and/or an improvement in the symptoms associated with the disease or condition. The therapeutic effects of the subject methods of treatment can be assessed using any suitable method. In some embodiments, the subject methods reduce the amount of a disease-associate protein deposition in the subject by at least 5%, 10%, 15%, 20%, 25%, 30%, 35%, 40%, 45%, 50%, 55%, 60%, 65%, 70%, 75%, 80%, 85%, 90%, 95%, or 99% as compared to the subject prior to undergoing treatment.

[0057] In another aspect, the present disclosure is related to engineered Clustered Regularly Interspaced Short Palindromic Repeats (CRISPR)/CRISPR associate protein 9 (Cas9) systems for preventing, ameliorating or treating corneal dystrophies. The CRISPR/Cas9 may comprise at least one vector comprising a nucleotide molecule encoding Cas9 nuclease and the sgRNAs and/or crRNAs as described herein. The terms “non-naturally occurring” or “engineered” are used interchangeably and indicate the involvement of the hand of man. The terms, when referring to nucleic acid molecules or polypeptides mean that the nucleic acid molecule or the polypeptide is at least substantially free from at least one other component with which they are naturally associated in nature and as found in nature. In some embodiments, the Cas9 nuclease and the sgRNA/crRNA do not naturally occur together.

[0058] In general, “CRISPR system” refers collectively to transcripts and other elements involved in the expression of or directing the activity of CRISPR-associated (“Cas”) genes, including sequences encoding a Cas gene, a tracr (trans-activating CRISPR) sequence (e.g., tracrRNA or an active partial tracrRNA), a tracr-mate sequence (encompassing a “direct repeat” and a tracrRNA-processed partial direct repeat in the context of an endogenous CRISPR system), a guide sequence (also referred to as “crRNA” herein, or a “spacer” in the context of an endogenous CRISPR system), and/or other sequences and transcripts from a CRISPR locus. As described above, sgRNA is a combination of at least tracrRNA and crRNA. In some embodiments, one or more elements of a CRISPR system are derived from a type II CRISPR system. In some embodiments, one or more elements of a CRISPR system are derived from a particular organism comprising an endogenous CRISPR system, such as Streptococcus pyogenes or Staphylococcus aureus. In general, a CRISPR system is characterized by elements that promote the formation of a CRISPR complex at the site of a target sequence (also referred to as a protospacer in the context of an endogenous CRISPR system). In the context of formation of a CRISPR complex, “target sequence” may refer to a sequence to which a guide sequence is designed to have complementarity, where hybridization between a target sequence and a guide sequence promotes the formation of a CRISPR complex, the “target sequence” may refer to a sequence adjacent to a PAM site, which the guide sequence comprises. Full complementarity is not necessarily required, provided there is sufficient complementarity to cause hybridization and promote formation of a CRISPR complex. In this disclosure, “target site” refers to a site of the target sequence including both the target sequence and its complementary sequence, for example, in double stranded nucleotides. In some embodiments, the target site described herein may mean a first target sequence hybridizing to sgRNA or crRNA of CRISPR/Cas9 system, and/or a second target sequence adjacent to the 5′-end of a PAM. A target sequence may comprise any polynucleotide, such as DNA or RNA polynucleotides. In some embodiments, a target sequence is located in the nucleus or cytoplasm of a cell. In some embodiments, the target sequence may be within an organelle of a eukaryotic cell, for example, mitochondrion or chloroplast.

[0059] The term “vector” refers to a nucleic acid molecule capable of transporting another nucleic acid to which it has been linked. Vectors include, but are not limited to, nucleic acid molecules that are single-stranded, double-stranded, or partially double-stranded; nucleic acid molecules that comprise one or more free ends, no free ends (e.g., circular); nucleic acid molecules that comprise DNA, RNA, or both; and other varieties of polynucleotides known in the art. One type of vector is a “plasmid,” which refers to a circular double stranded DNA loop into which additional DNA segments can be inserted, such as by standard molecular cloning techniques. Another type of vector is a viral vector, wherein virally-derived DNA or RNA sequences are present in the vector for packaging into a virus (e.g., retroviruses, replication defective retroviruses, adenoviruses, replication defective adenoviruses, and adeno-associated viruses). Viral vectors also include polynucleotides carried by a virus for transfection into a host cell. Certain vectors are capable of autonomous replication in a host cell into which they are introduced (e.g., bacterial vectors having a bacterial origin of replication and episomal mammalian vectors). Other vectors (e.g., non-episomal mammalian vectors) are integrated into the genome of a host cell upon introduction into the host cell, and thereby are replicated along with the host genome. Moreover, certain vectors are capable of directing the expression of genes to which they are operatively-linked. Such vectors are referred to herein as “expression vectors.” Common expression vectors of utility in recombinant DNA techniques are often in the form of plasmids. Recombinant expression vectors can comprise a nucleic acid of the invention in a form suitable for expression of the nucleic acid in a host cell, which means that the recombinant expression vectors include one or more regulatory elements, which may be selected on the basis of the host cells to be used for expression, that is operatively-linked to the nucleic acid sequence to be expressed. Within a recombinant expression vector, “operably linked” is intended to mean that the nucleotide sequence of interest is linked to the regulatory element(s) in a manner that allows for expression of the nucleotide sequence (e.g., in an in vitro transcription/translation system or in a host cell when the vector is introduced into the host cell). Advantageous vectors include lentiviruses and adeno-associated viruses, and types of such vectors can also be selected for targeting particular types of cells.

[0060] In some embodiments, at least one vector of the engineered CRISPR/Cas9 system described herein further comprises (a) a first regulatory element operably linked to the sgRNA that hybridizes with the target sequence described herein, and (b) a second regulatory element operably linked to the nucleotide molecule encoding Cas9 nuclease, wherein components (a) and (b) are located on a same vector or different vectors of the system, the sgRNA targets the target sequence, and the Cas9 nuclease cleaves the DNA molecule. The target sequence may be a nucleotide sequence complementary to from 16 to 25 nucleotides adjacent to the 5′ end of a PAM. Being “adjacent” herein means being within 2 or 3 nucleotides of the site of reference, including being “immediately adjacent,” which means that there is no intervening nucleotides between the immediately adjacent nucleotide sequences and the immediate adjacent nucleotide sequences are within 1 nucleotide of each other. In additional embodiments, the cell is a eukaryotic cell, or a mammalian or human cell, and the regulatory elements are eukaryotic regulators. In further embodiments, the cell is a stem cell described herein. In some embodiments, the Cas9 nuclease is codon-optimized for expression in a eukaryotic cell.

[0061] In some embodiments, the first regulatory element is a polymerase III promoter. In some embodiments, the second regulatory element is a polymerase II promoter. The term “regulatory element” is intended to include promoters, enhancers, internal ribosomal entry sites (IRES), and other expression control elements (e.g., transcription termination signals, such as polyadenylation signals and poly-U sequences). Such regulatory elements are described, for example, in Goeddel, GENE EXPRESSION TECHNOLOGY: METHODS IN ENZYMOLOGY 185, Academic Press, San Diego, Calif. (1990). Regulatory elements include those that direct constitutive expression of a nucleotide sequence in many types of host cell and those that direct expression of the nucleotide sequence only in certain host cells (e.g., tissue-specific regulatory sequences). A tissue-specific promoter may direct expression primarily in a desired tissue of interest, such as muscle, neuron, bone, skin, blood, specific organs (e.g., liver, pancreas), or particular cell types (e.g., lymphocytes). Regulatory elements may also direct expression in a temporal-dependent manner, such as in a cell-cycle dependent or developmental stage-dependent manner, which may or may not also be tissue or cell-type specific. In some embodiments, a vector comprises one or more pol III promoter (e.g., 1, 2, 3, 4, 5, or more pol I promoters), one or more pol II promoters (e.g., 1, 2, 3, 4, 5, or more pol II promoters), one or more pol I promoters (e.g., 1, 2, 3, 4, 5, or more pol I promoters), or combinations thereof. Examples of pol III promoters include, but are not limited to, U6 and H1 promoters. Examples of pol II promoters include, but are not limited to, the retroviral Rous sarcoma virus (RSV) LTR promoter (optionally with the RSV enhancer), the cytomegalovirus (CMV) promoter (optionally with the CMV enhancer) [see, e.g., Boshart et al, Cell, 41:521-530 (1985)], the SV40 promoter, the dihydrofolate reductase promoter, the β-actin promoter, the phosphoglycerol kinase (PGK) promoter, and the EF1α promoter. Also encompassed by the term “regulatory element” are enhancer elements, such as WPRE; CMV enhancers; the R-U5′ segment in LTR of HTLV-I (Mol. Cell. Biol., Vol. 8(1), p. 466-472, 1988); SV40 enhancer; and the intron sequence between exons 2 and 3 of rabbit β-globin (Proc. Natl. Acad. Sci. USA., Vol. 78(3), p. 1527-31, 1981).

[0062] In some embodiments, the Cas9 nuclease provided herein may be an inducible Cas9 nuclease that is optimized for expression in a temporal or cell-type dependent manner. The first regulatory element may be an inducible promoter that can be linked to the Cas9 nuclease include, but are not limited to, tetracycline-inducible promoters, metallothionein promoters; tetracycline-inducible promoters, methionine-inducible promoters (e.g., MET25, MET3 promoters); and galactose-inducible promoters (GAL1, GAL7 and GAL10 promoters). Other suitable promoters include the ADH1 and ADH2 alcohol dehydrogenase promoters (repressed in glucose, induced when glucose is exhausted and ethanol is made), the CUP1 metallothionein promoter (induced in the presence of Cu²⁺, Zn²⁺), the PHO5 promoter, the CYC1 promoter, the HIS3 promoter, the PGK promoter, the GAPDH promoter, the ADC1 promoter, the TRP1 promoter, the URA3 promoter, the LEU2 promoter, the ENO promoter, the TP1 promoter, and the AOX1 promoter.

[0063] It will be appreciated by those skilled in the art that the design of the expression vector can depend on such factors as the choice of the host cell to be transformed, the level of expression desired, etc. A vector can be introduced into host cells to thereby produce transcripts, proteins, or peptides, including fusion proteins or peptides, encoded by nucleic acids as described herein (e.g., clustered regularly interspersed short palindromic repeats (CRISPR) transcripts, proteins, enzymes, mutant forms thereof, fusion proteins thereof, etc.).

[0064] Exemplary CRISPR/Cas9 systems, sgRNA, crRNA and tracrRNA, and their manufacturing process and use are disclosed in U.S. Pat. No. 8,697,359, U.S. Patent Application Publication Nos. 20150232882, 20150203872, 20150184139, 20150079681, 20150073041, 20150056705, 20150031134, 20150020223, 20140357530, 20140335620, 20140310830, 20140273234, 20140273232, 20140273231, 20140256046, 20140248702, 20140242700, 20140242699, 20140242664, 20140234972, 20140227787, 20140189896, 20140186958, 20140186919, 20140186843, 20140179770, 20140179006, 20140170753, 20140093913, 20140080216, and WO2016049024, all of which are incorporated herein by their entirety.

[0065] In some embodiments, the Cas9 nucleases described herein are known; for example, the amino acid sequence of S. pyogenes Cas9 protein may be found in the SwissProt database under accession number Q99ZW2. The Cas9 nuclease may be a Cas9 homolog or ortholog. Mutant Cas9 nucleases that exhibit improved specificity may also be used (see, e.g., Ann Ran et al. Cell 154(6) 1380-89 (2013), which is herein incorporated by reference in its entirety for all purposes and particularly for all teachings relating to mutant Cas9 nucleases with improved specificity for target nucleic acids). The nucleic acid manipulation reagents can also include a deactivated Cas9 nuclease (dCas9). Deactivated Cas9 binding to nucleic acid elements alone may repress transcription by sterically hindering RNA polymerase machinery. Further, deactivated Cas may be used as a homing device for other proteins (e.g., transcriptional repressor, activators and recruitment domains) that affect gene expression at the target site without introducing irreversible mutations to the target nucleic acid. For example, dCas9 can be fused to transcription repressor domains such as KRAB or SID effectors to promote epigenetic silencing at a target site. Cas9 can also be converted into a synthetic transcriptional activator by fusion to VP16/VP64 or p64 activation domains. In some instances, a mutant Type II nuclease, referred to as an enhanced Cas9 (eCa9) nuclease, is used in place of the wild-type Cas9 nuclease. The enhanced Cas9 has been rationally engineered to improve specificity by weakening non-target binding. This has been achieved by neutralizing positively charged residues within the non-target strand groove (Slaymaker et al., 2016).

[0066] In some embodiments, the Cas9 nucleases direct cleavage of one or both strands at the location of a target sequence, such as within the target sequence and/or within the complement of the target sequence. In some embodiments, the Cas9 nucleases directs cleavage of one or both strands within about 1, 2, 3, 4, 5, 6, 7, 8, 9, 10, 15, 20, 25, 50, 100, 200, 500, or more base pairs from the first or last nucleotide of a target sequence.

[0067] Following directed DNA cleavage by the Cas9 nuclease, there are two modes of DNA repair available to the cell: homology directed repair (HDR) and non-homologous end joining (NHEJ). While seamless correction of the mutation by HDR following Cas9 cleavage close to the mutation site is attractive, the efficiency of this method means that it could only be used for in vitro/ex vivo modification of stem cells or induced pluripotent stem cells (iPSC) with an additional step to select those cells in which repair had taken place and purify those modified cells only. HDR does not occur at a high frequency in cells.

[0068] In some embodiments, the first and/or second PAMs and the Cas9 nuclease described herein are from Streptococcus or Staphylococcus. In additional embodiments, the first and second PAMs are both from Streptococcus or Staphylococcus. In additional embodiments, the Cas9 nuclease is from Streptococcus. In yet additional embodiments, the Cas9 nuclease is from Streptococcus pyogenes, Streptococcus dysgalactiae, Streptococcus canis, Streptococcus equi, Streptococcus iniae, Streptococcus phocae, Streptococcus pseudoporcinus, Streptococcus oralis, Streptococcus pseudoporcinus, Streptococcus infantarius, Streptococcus mutans, Streptococcus agalactiae, Streptococcus caballi, Streptococcus equinus, Streptococcus sp. oral taxon, Streptococcus mitis, Streptococcus gallolyticus, Streptococcus gordonii, or Streptococcus pasteurianus, or variants thereof. Such variants may include D10A Nickase, Spy Cas9-HF1 as described in Kleinstiver et al, 2016 Nature, 529, 490-495, or Spy eCas9 as described in Slaymaker et al., 2016 Science, 351(6268), 84-88. In additional embodiments, the Cas9 nuclease is from Staphylococcus. In yet additional embodiments, the Cas9 nuclease is from Staphylococcus aureus, S. simiae, S. auricularis, S. carnosus, S. condiments, S. massiliensis, S. piscifermentans, S. simulans, S. capitis, S. caprae, S. epidermidis, S. saccharolyticus, S. devriesei, S. haemolyticus, S. hominis, S. agnetis, S. chromogenes, S. felis, S. delphini, S. hyicus, S. intermedius, S. lutrae, S. microti, S. muscae, S. pseudintermedius, S. rostri, S. schleiferi, S. lugdunensis, S. arlettae, S. cohnii, S. equorum, S. gallinarum, S. kloosii, S. leei, S. nepalensis, S. saprophyticus, S. succinus, S. xylosus, S. fleurettii, S. lentus, S. sciuri, S. stepanovicii, S. vitulinus, S. simulans, S. pasteuri, S. warneri, or variants thereof.

[0069] In further embodiments, the Cas9 nuclease excludes Cas9 nuclease from Streptococcus pyogenes.

[0070] In additional embodiments, the Cas9 nuclease comprises an amino acid sequence having at least about 60, 63, 64, 65, 66, 67, 68, 69, 70, 71, 72, 73, 74, 75, 76, 77, 78, 79, 80, 81, 82, 83, 84, 85, 86, 87, 88, 89, 90, 91, 92, 93, 94, 95, 96, 97, 98, 99 or 100% sequence identity with an amino acid sequence selected from the group consisting of SEQ ID NO: 4 or 8. In additional embodiments, the nucleotide molecule encoding Cas9 nuclease comprises a nucleotide sequence having at least about 60, 63, 64, 65, 66, 67, 68, 69, 70, 71, 72, 73, 74, 75, 76, 77, 78, 79, 80, 81, 82, 83, 84, 85, 86, 87, 88, 89, 90, 91, 92, 93, 94, 95, 96, 97, 98, 99 or 100% sequence identity with a nucleotide sequence selected from the group consisting of SEQ ID NO: 3 or 7. In yet additional embodiments, Cas9 sgRNA sequence may comprises a sequence having at least about 60, 63, 64, 65, 66, 67, 68, 69, 70, 71, 72, 73, 74, 75, 76, 77, 78, 79, 80, 81, 82, 83, 84, 85, 86, 87, 88, 89, 90, 91, 92, 93, 94, 95, 96, 97, 98, 99 or 100% sequence identity with SEQ ID NO: 1 or 5. An exemplary tracrRNA or sgRNA scaffold sequence may comprise a sequence having at least about 60, 63, 64, 65, 66, 67, 68, 69, 70, 71, 72, 73, 74, 75, 76, 77, 78, 79, 80, 81, 82, 83, 84, 85, 86, 87, 88, 89, 90, 91, 92, 93, 94, 95, 96, 97, 98, 99 or 100% sequence identity with SEQ ID NO: 2 or 6.

[0071] In some embodiments, the Cas9 nuclease is an enhanced Cas9 nuclease that has one or more mutations improving specificity of the Cas9 nuclease. In additional embodiments, the enhanced Cas9 nuclease is from a Cas9 nuclease from Streptococcus pyogenes having one or more mutations neutralizing a positively charged groove, positioned between the HNH, RuvC, and PAM-interacting domains in the Cas9 nuclease. In yet additional embodiments, the Cas9 nuclease comprises an amino acid sequence having at least about 60, 61, 62, 63, 64, 65, 66, 67, 68, 69, 70, 71, 72, 73, 74, 75, 76, 77, 78, 79, 80, 81, 82, 83, 84, 85, 86, 87, 88, 89, 90, 91, 92, 93, 94, 95, 96, 97, 98, 99 or 100% sequence identity with a mutant amino acid sequence of a Cas9 nuclease from Streptococcus pyogenes (e.g., SEQ ID NO: 4) with one or more mutations selected from the group consisting of (i) K855A, (ii) K810A, K1003A and R1060A, and (iii) K848A, K1003A and R1060A. In yet further embodiments, the nucleotide molecule encoding Cas9 nuclease comprises a nucleotide sequence having at least about 60, 61, 62, 63, 64, 65, 66, 67, 68, 69, 70, 71, 72, 73, 74, 75, 76, 77, 78, 79, 80, 81, 82, 83, 84, 85, 86, 87, 88, 89, 90, 91, 92, 93, 94, 95, 96, 97, 98, 99 or 100% sequence identity with a nucleotide sequence encoding the mutant amino acid sequence.

[0072] In some embodiments, the CRISPR/Cas9 system and the methods using the CRISPR/Cas9 system described herein alter a DNA sequence by the NHEJ. In additional embodiments, the CRISPR/Cas9 system or the vector described herein does not include a repair nucleotide molecule. In some embodiments, the methods described herein alter a DNA sequence by the HDR. In some embodiments, the CRISPR/Cas9 system or the vector described herein may further comprise a repair nucleotide molecule. The target polynucleotide cleaved by the Cas9 nuclease may be repaired by homologous recombination with the repair nucleotide molecule, which is an exogenous template polynucleotide. This repair may result in a mutation comprising an insertion, deletion, or substitution of one or more nucleotides of said target polynucleotide. The repair nucleotide molecule introduces a specific allele (e.g., a wild-type allele) into the genome of one or more cells of the plurality of stem cells upon repair of a Type II nuclease induced DSB through the HDR pathway. In some embodiments, the repair nucleotide molecule is a single stranded DNA (ssDNA). In other embodiments, the repair nucleotide molecule is introduced into the cell as a plasmid vector. In some embodiments, the repair nucleotide molecule is 20 to 25, 25 to 30, 30 to 35, 35 to 40, 40 to 45, 45 to 50, 50 to 55, 55 to 60, 60 to 65, 65 to 70, 70 to 75, 75 to 80, 80 to 85, 85 to 90, 90 to 95, 95 to 100, 100 to 105, 105 to 110, 110 to 115, 115 to 120, 120 to 125, 125 to 130, 130 to 135, 135 to 140, 140 to 145, 145 to 150, 150 to 155, 155 to 160, 160 to 165, 165 to 170, 170 to 175, 175 to 180, 180 to 185, 185 to 190, 190 to 195, or 195 to 200 nucleotides in length. In some embodiments, the repair nucleotide molecule is 200 to 300, 300, to 400, 400 to 500, 500 to 600, 600 to 700, 700 to 800, 800 to 900, 900 to 1,000 nucleotides in length. In other embodiments, the repair nucleotide molecule is 1,000 to 2,000, 2,000 to 3,000, 3,000 to 4,000, 4,000 to 5,000, 5,000 to 6,000, 6,000 to 7,000, 7,000 to 8,000, 8,000 to 9,000, or 9,000 to 10,000 nucleotides in length.

[0073] The repair nucleotide molecule may further include a label for identification and sorting of cells described herein containing the specific mutation. Exemplary labels that can be included with the repair nucleotide molecule include fluorescent labels and nucleic acid barcodes that are identifiable by length or sequence.

[0074] In additional embodiments, the CRISPR/Cas9 system or the vector described herein may include at least one nuclear localization signal (NLS). In additional embodiments, the sgRNA and the Cas9 nuclease are included on the same vector or on different vectors.

[0075] As used herein, a “corneal dystrophy” refers to any one of a group of hereditary disorders in the outer layer of the eye (cornea). For example, the corneal dystrophy may be characterized by bilateral abnormal deposition of substances in the cornea. Corneal dystrophies include, but are not limited to the following four IC3D categories of corneal dystrophies (see, e.g., Weiss et al., Cornea 34(2): 117-59 (2015)): epithelial and sub-epithelial dystrophies, epithelial-stromal TGFβI dystrophies, stromal dystrophies and endothelial dystrophies. In some embodiments, the corneal dystrophy is selected from the group consisting of Epithelial basement membrane dystrophy (EBMD), Meesmann corneal dystrophy (MECD), Thiel-Behnke corneal dystrophy (TBCD), Lattice corneal dystrophy (LCD), Granular corneal dystrophy (GCD), and Schnyder corneal dystrophy (SCD). In additional embodiments, the corneal dystrophy is caused by one or more mutations, including SNP, is located in a gene selected from the group consisting of Transforming growth factor, beta-induced (TGFBI), keratin 3 (KRT3), keratin 12 (KRT12), GSN, and UbiA prenyltransferase domain containing 1 (UBIAD1). In further embodiments, the mutation or SNP site results in encoding a mutant amino acid in a mutant protein as shown herein. In further embodiments, a mutant sequence comprising the mutation or SNP site encodes a mutant protein selected from the group consisting of (i) mutant TGFBI proteins comprising a mutation corresponding to Leu509Arg, Arg666Ser, Gly623Asp, Arg555Gln, Arg124Cys, Val505Asp, Ile522Asn, Leu569Arg, His572Arg, Arg496Trp, Pro501Thr, Arg514Pro, Phe515Leu, Leu518Pro, Leu518Arg, Leu527Arg, Thr538Pro, Thr538Arg, Val539Asp, Phe540del, Phe540Ser, Asn544Ser, Ala546Thr, Ala546Asp, Phe547Ser, Pro551Gln, Leu558Pro, His572del, Gly594Val, Val613del, Val613Gly, Met619Lys, Ala620Asp, Asn622His, Asn622Lys, Asn622Lys, Gly623Arg, Gly623Asp, Val624_Val625del, Val624Met, Val625Asp, His626Arg, His626Pro, Val627SerfsX44, Thr629_Asn630insAsnValPro, Val631Asp, Arg666Ser, Arg555Trp, Arg124Ser, Asp123delins, Arg124His, Arg124Leu, Leu509Pro, Leu103_Ser104del, Val113Ile, Asp123His, Arg124Leu, and/or Thr125_Glu126del in TGFBI, for example, of Protein Accession No. Q15582; (ii) mutant KRT3 proteins comprising a mutation corresponding to Glu498Val, Arg503Pro, and/or Glu509Lys in Keratin 3 protein, for example, of Protein Accession No. P12035 or NP_476429.2; (iii) mutant KRT12 proteins with Met129Thr, Met129Val, Gln130Pro, Leu132Pro, Leu132Va, Leu132His, Asn133Lys, Arg135Gly, Arg135Ile, Arg135Thr, Arg135Ser, Ala137Pro, Leu140Arg, Val143Leu, Val143Leu, Lle391_Leu399dup, Ile 426Val, Ile426Ser, Tyr429Asp, Tyr429Cys, Arg430Pro, and/or Leu433Arg in KRT12, for example, of Protein Accession No. Q99456.1 or NP_000214.1; (iv) mutant GSN proteins with Asp214Tyr in GSN, for example, of Protein Accession No. P06396; and (v) mutant UBIAD1 proteins comprising a mutation corresponding to Ala97Thr, Gly98Ser, Asn102Ser, Asp112Asn, Asp112Gly, Asp118Gly, Arg119Gly, Leu121Val, Leu121Phe, Val122Glu, Val122Gly, Ser171Pro, Tyr174Cys, Thr175Ile, Gly177Arg, Lys181Arg, Gly186Arg, Leu188His, Asn232Ser, Asn233His, Asp236Glu, and/or Asp240Asn in UBIAD1, for example, of Protein Accession No. Q9Y5Z9. For example, a mutant sequence comprising the mutation or SNP site encodes at least a part of mutant TGFBI protein mutated by replacing Leu with Arg at amino acid position corresponding the amino acid position 509 of Protein Accession No. Q15582. In this case, a mutation at the mutation or SNP site may be responsible for encoding the mutant amino acid at amino acid position corresponding the amino acid position 509 of Protein Accession No. Q15582. As used herein, a mutation “corresponding to” a particular mutation in a human protein may include a mutation in a different species that occur at the corresponding site of the particular mutation of the human protein. Also as used herein, when a mutant protein is described to include a particular mutant, for example, of Leu509Arg, such a mutant protein may comprise any mutation that occurs at a mutant site corresponding to the particular mutant in a relevant human protein, for example, in TGFBI protein of Protein Accession No. Q15582 as described herein.

[0076] In another aspect, the present disclosure is also related to methods of altering expression of at least one gene product comprising introducing the engineered CRISPR/Cas9 system described herein into a cell containing and expressing a DNA molecule having a target sequence and encoding the gene product. The engineered CRISPR/Cas9 system can be introduced into cells using any suitable method. In some embodiments, the introducing may comprise administering the engineered CRISPR/Cas9 system described herein to cells in culture, or in a host organism.

[0077] Exemplary methods for introducing the engineered CRISPR/Cas9 system include, but are not limited to, transfection, electroporation and viral-based methods. In some cases, the one or more cell uptake reagents are transfection reagents. Transfection reagents include, for example, polymer based (e.g., DEAE dextran) transfection reagents and cationic liposome-mediated transfection reagents. Electroporation methods may also be used to facilitate uptake of the nucleic acid manipulation reagents. By applying an external field, an altered transmembrane potential in a cell is induced, and when the transmembrane potential net value (the sum of the applied and the resting potential difference) is larger than a threshold, transient permeation structures are generated in the membrane and electroporation is achieved. See, e.g., Gehl et al., Acta Physiol. Scand. 177:437-447 (2003). The engineered CRISPR/Cas9 system also may be delivered through viral transduction into the cells. Suitable viral delivery systems include, but are not limited to, adeno-associated virus (AAV), retroviral and lentivirus delivery systems. Such viral delivery systems are useful in instances where the cell is resistant to transfection. Methods that use a viral-mediated delivery system may further include a step of preparing viral vectors encoding the nucleic acid manipulation reagents and packaging of the vectors into viral particles. Other method of delivery of nucleic acid reagents include, but are not limited to, lipofection, nucleofection, microinjection, biolistics, virosomes, liposomes, immunoliposomes, polycation or lipid:nucleic acid conjugates, naked DNA, artificial virions, and agent-enhanced uptake of nucleic acids. See, also Neiwoehner et al., Nucleic Acids Res. 42:1341-1353 (2014), and U.S. Pat. Nos. 5,049,386, 4,946,787; and 4,897,355, which are herein incorporated by reference in its entirety for all purposes, and particularly for all teachings relating to reagent delivery systems. In some embodiments, the introduction is performed by non-viral vector delivery systems include DNA plasmids, RNA (e.g., a transcript of a vector described herein), naked nucleic acid, and nucleic acid complexed with a delivery vehicle, such as a liposome. Delivery can be to cells (e.g., in vitro or ex vivo administration) or target tissues (e.g., in vivo administration).

[0078] The cells that have undergone a nucleic acid alteration event (i.e., a “altered” cell) can be isolated using any suitable method. In some embodiments, the repair nucleotide molecule further comprises a nucleic acid encoding a selectable marker. In these embodiments, successful homologous recombination of the repair nucleotide molecule a host stem cell genome is also accompanied by integration of the selectable marker. Thus, in such embodiments, the positive marker is used to select for altered cells. In some embodiments, the selectable marker allows the altered cell to survive in the presence of a drug that otherwise would kill the cell. Such selectable markers include, but are not limited to, positive selectable markers that confer resistance to neomycin, puromycin or hygromycin B. In addition, a selectable marker can be a product that allows an altered cell to be identified visually among a population of cells of the same type, some of which do not contain the selectable marker. Examples of such selectable markers include, but are not limited to the green fluorescent protein (GFP), which can be visualized by its fluorescence; the luciferase gene, which, when exposed to its substrate luciferin, can be visualized by its luminescence; and β-galactosidase (β-gal), which, when contacted with its substrate, produces a characteristic color. Such selectable markers are well known in the art and the nucleic acid sequences encoding these markers are commercially available (see, e.g., Sambrook et al., Molecular Cloning: A Laboratory Manual (Cold Spring Harbor Laboratory Press 1989). Methods that employ selectable markers that can be visualized by fluorescence may further be sorted using Fluorescence Activated Cell Sorting (FACS) techniques. Isolated manipulated cells may be used to establish cell lines for transplantation. The isolated altered cells can be cultured using any suitable method to produce a stable cell line.

[0079] In another aspect, the present disclosure is related to methods of treating a disease associated with a gene mutation or single-nucleotide polymorphism (SNP) in a subject in need thereof, comprising: (a) obtaining a plurality of stem cells comprising a nucleic acid mutation in a corneal dystrophy target nucleic acid from the subject; (b) manipulating the nucleic acid mutation in one or more stem cells of the plurality of stem cells to correct the nucleic acid mutation, thereby forming one or more manipulated stem cells; (c) isolating the one or more manipulated stem cells; and (d) transplanting the one or more manipulated stem cells into the subject, wherein manipulating the nucleic acid mutation in the one or more stem cells of the plurality of stem cells includes performing any of the methods of altering expression of a gene product or of preventing, ameliorating, or treating a disease associated with a gene mutation or single-nucleotide polymorphism (SNP) in a subject as described herein.

[0080] The subject methods may include obtaining a plurality of stem cells. Any suitable stem cells can be used for the subject method, depending on the type of the disease to be treated. In certain embodiments, the stem cell is obtained from a heterologous donor. In such embodiments, the stem cells of the heterologous donor and the subject to be treated are donor-recipient histocompatible. In certain embodiments, autologous stem cells are obtained from the subject in need of the treatment for the disease. Obtained stem cells carry a mutation in a gene associated with the particular disease to be treated. Suitable stem cells include, but are not limited to, dental pulp stem cells, hair follicle stem cells, mesenchymal stem cells, umbilical cord lining stem cells, embryonic stem cells, oral mucosal epithelial stem cells and limbal epithelial stem cells.

[0081] Stem cells to be manipulated may include individual isolated stem cells or stem cells from a stem cell line established from the isolated stem cells. Any suitable genetic manipulation method may be used to correct the nucleic acid mutation in the stem cells.

[0082] In another aspect, provided herein are kits comprising the CRISPR/Cas9 system for the treatment of a disease associated with a gene mutation or single-nucleotide polymorphism (SNP). In some embodiments, the kit includes one or more sgRNAs described herein, a Cas9 nuclease and a repair nucleotide molecule that includes a wild-type allele of the mutation to be repaired as described herein. In some embodiments, the kit also includes agents that facilitate uptake of the nucleic acid manipulation by cells, for example, a transfection agent or an electroporation buffer. In some embodiments, the subject kits provided herein include one or more reagents for the detection or isolation of stem cells, for example, labeled antibodies for one or more positive stem cell markers that can be used in conjunction with FACS.

[0083] In another aspect, the present disclosure is related to an sgRNA pair, and a kit comprising the sgRNA pair comprising at least two sgRNAs for CRISPR/Cas9 system to silence a disease-causing mutation or SNP, for example, for preventing, ameliorating or treating corneal dystrophies. In some embodiments, the sgRNA pair comprises an sgRNA comprising a guide sequence for PAM-generating ancestral variation or SNP in a target gene, for example, in an intron in cis with a disease-causing mutation or SNP. In additional embodiments, the sgRNA pair comprises an sgRNA comprising a common guide sequence for PAM generating an ancestral SNP in intronic regions of a target gene.

### EXAMPLES

[0084] The following examples are presented to illustrate various embodiments of the invention. It is understood that such examples do not represent and are not intended to represent exclusive embodiments; such examples serve merely to illustrate the practice of this invention.

[0085] Mutation analysis: Mutations associated with various corneal dystrophies were analyzed to determine which were solely caused by missense mutations or in-frame indels. This analysis indicates that for the majority of K12 and TGFBI disease, nonsense or frameshifting indel mutations are not associated with disease. Furthermore, an analysis of the exome variant database confirmed that any naturally occurring nonsense, frameshifting indels or splice site mutations found in these genes are not reported to be associated with disease in these individuals.

[0086] Mutation analysis revealed that the following corneal-dystrophy genes are suitable for targeted nuclease gene therapy (Table 1).

TABLE 1
Genes and their associated corneal dystrophies that
are suitable for a CRISPR/Cas9 mediated approach.

| Gene | Associated Corneal Dystrophies |
|---|---|
| TGFBI | Avellino corneal dystrophy |
| | Reis-Bücklers corneal dystrophy |
| | Thiel-Behnke corneal dystrophy |
| | Grayson -Wilbrandt corneal dystrophy |
| | Lattice Corneal Dystrophy I & II |
| | Granular Corneal Dystrophy I, II & III |
| | Epithelial Basement Membrane Dystrophy |
| KRT3 | Meesemann Epithelial Corneal Dystrophy |
| KRT12 | Meesemann Epithelial Corneal Dystrophy |
| UBIAD1 | Schnyder corneal dystrophy |

[0087] An investigation of the suitable corneal dystrophy genes was conducted for this report to determine the number of mutations targetable by either a PAM-specific approach or a guide allele-specific approach. A PAM-specific approach requires the disease causing SNP to generate a novel PAM, whilst the allele specific approach involves the design of a guide containing the disease causing SNP. All non-disease causing SNPs in TGFBI that generate a novel PAM with a minor allele frequency (MAF) of >10% were identified and analyzed by the Benchling's online genome-editing design tool. The selection of SNPs with a MAF of >10% may provide a reasonable chance that the SNP resulting in a novel PAM will be found in cis with the disease causing mutation. Being “in cis” with the disease causing mutation refers to being on the same molecule of DNA or chromosome as the disease-causing mutation. The SNP resulting in a novel PAM may be found, for example, in intron or exon in TGFBI gene in cis with the disease-causing mutation. All variants within TGFBI were analyzed to determine whether a novel PAM was created (Table 2).

[0088] As shown in FIG. 4, the positions of the variants within TGFBI, with most of the SNPs clustered in introns. Thus, multiple TGFBI mutations located in the hotspots in exons 11, 12 and 14 may be targeted simultaneously using this approach. Therefore, a CRISPR Cas 9 system may target more than one patient or one family with a mutation. One CRISPR/Cas9 system designed in this way may be used to treat a range of TGFBI mutations. The CRISPR/Cas9 system may employ an sgRNA adjacent to a PAM site located in the flanking intron that is common to both wild-type and mutant alleles in tandem with a sgRNA adjacent to a PAM site that is specific to the mutant allele (FIG. 16). This would result in NHEJ in the intron of the wild-type allele that should have no functional effect, while in the mutant allele would result in a deletion encompassing the DNA between the two cut sites. This technique is demonstrated in leucocytes isolated from a patient with a suitable SNP profile.

TABLE 2
The variants within TGFB1 that result in a novel PAM that have a MAF of >10%.
The novel PAM is shown with the required variant indicated in red.

| | | | | | | | | Novel PAM | | | | Population Genetics | | | | | |
|---|---|---|---|---|---|---|---|---|---|---|---|---|---|---|---|---|---|
| | | | Region | Region | | | | (Required | | | | All | | | | | |
| | Num- | | Start | End | Variant | | Vari- | variant | Guide | | | Individ- | | Ameri- | East | | South |
| Region | ber | Position | Co-ordinate | Co-ordinate | Co-ordinate | SNP | ant | in red) | Sequence | Strand | MAF | uals | African | can | Asian | European | Asian |
| Exon | 1 | | 136,028,895 | 136,029,189 | | | | | | | | | | | | | |
| 1 to 2 | | Intronic | 136 209 190 | 136 033 762 | 136,032,206- | rs756462 | T/C | ccc | GAATCCA | − | 0.31 | T: 69% | 5: 56% | T: 63% | T: | T: 79% | T: |
| | | variant, | | | | | | | TGTAAGG | | | C: 31% | C: 44% | C: 37% | 64% | C: 21% | 85% |
| | | 1607 bp | | | | | | | ATCTAG | | | | | | C: | | C: |
| | | away | | | | | | | | | | | | | 36% | | 15% |
| | | from | | | | | | | | | | | | | | | |
| | | exon 2 | | | | | | | | | | | | | | | |
| Exon | 2 | | 136,033,763 | 136,033,861 | | | | | | | | | | | | | |
| Intron | 2 to | Intronic | 136,0 | 136,0 | 136,0 | rs1989972 | A/C | attcca | CAGGGCT | − | 0.43 | A: 43% | A: 26% | A: 51% | A: | A: 52% | A |
| | 3 | variant, | | | | | | | GTATTAC | | | | | | 42% | | 49% |
| | | 1945 bp | | | | | | | TGGGGC | | | | | | | | |
| | | away | | | | | | | | | | | | | | | |
| | | from | | | | | | | | | | | | | | | |
| | | exon 3 | | | | | | | | | | | | | | | |
| | | Intronic | | | | RS1989972 | A/C | cca | CAGGGCT | − | 0.43 | A: 43% | A: 26% | A: 51% | A: | A: 52% | A: |
| | | variant, | | | | | | | GTATTAC | | | | | | 42% | | 49% |
| | | 1945 bp | | | | | | | TGGGGC | | | | | | | | |
| | | away | | | | | | | | | | | | | | | |
| | | from | | | | | | | | | | | | | | | |
| | | exon 3 | | | | | | | | | | | | | | | |
| | | Intronic | | | | rs1989972 | A/C | ccc | AGGGCTG | − | 0.43 | A: 43% | A: 26% | A: 51% | A: | A: 52% | A: |
| | | variant, | | | | | | | TATTACT | | | C: 57% | C: 74% | C: 49% | 42% | C: 48% | 49% |
| | | 1945 bp | | | | | | | GGGGCT | | | | | | C: | | |
| | | away | | | | | | | | | | | | | 58% | | |
| | | from | | | | | | | | | | | | | | | |
| | | exon 3 | | | | | | | | | | | | | | | |
| | | Intronic | | | 136,043,042- | rs2805700 | A/G | agg | ATTCATA | + | 0.41 | A: 59% | A: 40% | A: 63% | A: | A: 72% | A: |
| | | variant, | | | | | | | TAGAAGA | | | G: 41% | G: 60% | G: 37% | 66% | G: 28% | 63% |
| | | 966 bp | | | | | | | AAGGAA | | | | | | G: | | G: |
| | | away | | | | | | | | | | | | | 34% | | 37% |
| | | from | | | | | | | | | | | | | | | |
| | | exon 3 | | | | | | | | | | | | | | | |
| Exon | 3 | | 136,044,058 | 136,044,122 | | | | | | | | | | | | | |
| Intron | 3 to | | 136,044,123 | 136,046,334 | | | | | | | | | | | | | |
| | 4 | | | | | | | | | | | | | | | | |
| Exon | 4 | | 136,046,335 | 136,046,495 | | | | | | | | | | | | | |
| Intron | 4 to | | 136,046,496 | 136,046,850 | | | | | | | | | | | | | |
| | 5 | | | | | | | | | | | | | | | | |
| Exon | 5 | | 136,046,851 | 136,047,015 | | | | | | | | | | | | | |
| Intron | 5 to | | 136,047,016 | 136,047,273 | | | | | | | | | | | | | |
| | 6 | | | | | | | | | | | | | | | | |
| Exon | 6 | Synony- | 136,047,274 | 136,047,420 | 136,047,250- | rs1442 | G/C | CCT | TTGCATG | − | 0.32 | C: 32% | C: 3% | C: 45% | C: | C: 47% | C: |
| | | mous | | | | | | | GTGGTCG | | | G: 68% | G: 97% | G: 55% | 37% | G: 53% | 40% |
| | | variant, | | | | | | | GCTTTC | | | | | | G: | | G: |
| | | protein | | | | | | | | | | | | | 63% | | 60% |
| | | position | | | | | | | | | | | | | | | |
| | | 217 | | | | | | | | | | | | | | | |
| Intron | 6 to | Intronic | 136,047,421 | 136,049,438 | 136,047,489- | rs764567 | A/G | cgg | TCCTGTA | + | 0.3 | A: 70% | A: 70% | A: 67% | A: | A: 74% | A: |
| | 7 | variant, | | | | | | | GGGGAAC | | | G: 30% | G: 30% | G: 33% | 75% | G: 26% | 64% |
| | | 119 bp | | | | | | | ATAGAG | | | | | | G: | | G |
| | | away | | | | | | | | | | | | | 25% | | 36% |
| | | from | | | | | | | | | | | | | | | |
| | | exon 6 | | | | | | | | | | | | | | | |
| | | Intronic | | | | rs764567 | A/G | gcgggt | CTCCTGT | + | 0.3 | A: 70% | A: 70% | A: 67% | A: | A: 74% | A: |
| | | variant, | | | | | | | AGGGGAA | | | G: 30% | G: 30% | G: 33% | 75% | G: 26% | 64% |
| | | 119 bp | | | | | | | CATAGA | | | | | | G: | | G |
| | | away | | | | | | | | | | | | | 25% | | 36% |
| | | from | | | | | | | | | | | | | | | |
| | | exon 6 | | | | | | | | | | | | | | | |
| | | Intronic | | | 136,047,6 | rs2073509 | A/G | agg | GTGTGTG | + | 0.4 | T: 60% | T: 39% | T: 63% | T: | T: 74% | T: |
| | | variant, | | | | | | | GCTGCAG | | | G: 40% | G: 61% | G: 37% | 66% | G: 26% | 63% |
| | | 268 bp | | | | | | | CAGCAC | | | | | | G: | | G: |
| | | away | | | | | | | | | | | | | 34% | | 37% |
| | | from | | | | | | | | | | | | | | | |
| | | variant | | | | | | | | | | | | | | | |
| | | Intronic | | | | rs2073509 | T/G | ggg | TGTGTGG | + | 0.4 | T: 60% | T: 39% | T: 63% | T: | T: 74% | T: |
| | | variant, | | | | | | | CTGCAGC | | | G: 40% | G: 61% | G: 37% | 66% | G: 26% | 63% |
| | | 268 bp | | | | | | | AGCACA | | | | | | G: | | G: |
| | | away | | | | | | | | | | | | | 34% | | 37% |
| | | from | | | | | | | | | | | | | | | |
| | | variant | | | | | | | | | | | | | | | |
| | | Intronic | | | | rs2073509 | T/G | cagggt | GGTGTGT | + | 0.4 | T: 60% | T: 39% | T: 63% | T: | T: 74% | T: |
| | | variant, | | | | | | | GGCTGCA | | | G: 40% | G: 61% | G: 37% | 66% | G: 26% | 63% |
| | | 268 bp | | | | | | | GCAGCA | | | | | | G: | | G: |
| | | away | | | | | | | | | | | | | 34% | | 37% |
| | | from | | | | | | | | | | | | | | | |
| | | variant | | | | | | | | | | | | | | | |
| | | Intronic | | | 136,048,154- | rs2073511 | T/C | cct | GGAGAGG | − | 0.4 | T: 60% | T: 39% | T: 63% | T: | T: 74% | T: |
| | | variant, | | | | | | | AGCTTAG | | | C: 40% | C: 61% | C: 37% | 66% | C: 26% | 63% |
| | | 784 bp | | | | | | | ACAGCG | | | | | | C: | | C: |
| | | away | | | | | | | | | | | | | 34% | | 37% |
| | | from | | | | | | | | | | | | | | | |
| | | variant | | | | | | | | | | | | | | | |
| | | Intronic | | | 136,048,704- | rs916951 | A/G | cgg | GTAATAG | + | 0.37 | A: 63% | A: 95% | A: 53% | A: | A: 49% | A: |
| | | variant, | | | | | | | CAAAGGC | | (G) | G: 37% | G: 5% | G: 47% | 58% | G: 51% | 50% |
| | | 685 bp | | | | | | | TCAGGG | | | | | | G: | | G: |
| | | from | | | | | | | | | | | | | 42% | | 50% |
| | | exon 7 | | | | | | | | | | | | | | | |
| Exon | 7 | | 136,049,439 | 136,049,580 | | | | | | | | | | | | | |
| Intron | 7 to | Intronic | 136,049,581 | 136,052,906 | 136,050,039- | rs1137550 | T/C | actctg | ATCCGCC | − | 0.37 | T: 63% | T: 52% | T: 64% | T: | T: 74% | T: |
| | 8 | variant, | | | | | | | CACCTTG | | | C: 37% | C: 48% | C: 36% | 66% | C: 26% | 63% |
| | | 590 bp | | | | | | | TCCTCC | | | | | | C: | | C: |
| | | from | | | | | | | | | | | | | 34% | | 37% |
| | | exon 7 | | | | | | | | | | | | | | | |
| Exon | 8 | Synony- | 136,052,907 | 136,053,119 | 136,052,924 | rs1054124 | A/G | TGG | CATCGTT | + | 0.39 | A: 61% | A: 46% | A: 64% | A: | A: 74% | A: |
| | | mous | | | | | | | GCGGGGC | | | G: 39% | G: 54% | G: 36% | 66% | G: 26% | 63% |
| | | variant, | | | | | | | TGTCTG | | | | | | G: | | G: |
| | | protein | | | | | | | | | | | | | 34% | | 37% |
| | | position | | | | | | | | | | | | | | | |
| | | 327 | | | | | | | | | | | | | | | |
| Intron | 8 to | Intronic | 136,053,120 | 136,053,942 | 136,053,686- | rs6889640 | C/A | actctc | CCAGCTC | − | 0.37 | A: 37% | A: 54% | A: 24% | A: | A: 26% | A: |
| | 9 | variant, | | | | | | | AGGAGGA | | | C: 63% | C: 46% | C: 76% | 34% | C: 74% | 37% |
| | | 207 bp | | | | | | | GAGGGAG | | | | | | C: | | C: |
| | | from | | | | | | | | | | | | | 66% | | 63% |
| | | exon 9 | | | | | | | | | | | | | | | |
| Exon | 9 | | 136,053,943 | 136,054,080 | | | | | | | | | | | | | |
| Intron | 9 to | | 136,054,081 | 136,054,715 | | | | | | | | | | | | | |
| | 10 | | | | | | | | | | | | | | | | |
| Exon | 10 | | 136,054,716 | 136,054,861 | | | | | | | | | | | | | |
| Intron | 10 | Intronic | 136,054,862 | 136,055,679 | 136,055,587- | rs6860369 | A/G | ggg | CAAATCA | + | 0.4 | A: 60% | A: 33% | A: 75% | A: | A: 74% | A: |
| | to | variant, | | | | | | | GGAGGCC | | | G: 40% | G: 67% | G: 25% | 66% | G: 26% | 63% |
| | 11 | 43 bp | | | | | | | CCTCGT | | | | | | G: | | G: |
| | | from | | | | | | | | | | | | | 34% | | 37% |
| | | exon 11 | | | | | | | | | | | | | | | |
| Exon | 11 | | 136,055,680 | 136,055,816 | | | | | | | | | | | | | |
| Intron | 11 | | 136,055,817 | 136,056,664 | | | | | | | | | | | | | |
| | to | | | | | | | | | | | | | | | | |
| | 12 | | | | | | | | | | | | | | | | |
| Exon | 12 | | 136,056,665 | 136,056,795 | | | | | | | | | | | | | |
| Intron | 12 | Intronic | 136,056,796 | 136,059,089 | 136,057,458- | rs6871571 | A/G | ttgaat | TGCAGCC | + | 0.42 | A: 58% | A: 33% | A: 63% | A: | A: 74% | A: |
| | to | variant, | | | | | | | TGTGTTG | | | G: 42% | G: 67% | G: 37% | 66% | G: 26% | 63% |
| | 13 | 713 bp | | | | | | | GGAGGA | | | | | | G: | | G: |
| | | from | | | | | | | | | | | | | 34% | | 37% |
| | | exon 12 | | | | | | | | | | | | | | | |
| Exon | 13 | | 136,059,090 | 136,059,214 | | | | | | | | | | | | | |
| Intron | 13 | Intronic | 136,059,215 | 136,060,833 | 136,059,694- | rs6893691 | A/G | cgg | AATCTCC | + | 0.39 | A: 39% | A:11 % | A: 49% | A: | A: 52% | A: |
| | to | variant, | | | | | | | CTGGCTG | | | G: 61% | G: 89% | G: 51% | 43% | G: 48% | 51% |
| | 14 | 530 bp | | | | | | | CACCTG | | | | | | G: | | G: |
| | | from | | | | | | | | | | | | | 57% | | 49% |
| | | exon 13 | | | | | | | | | | | | | | | |
| | | Intronic | | | 136,059,804- | rs1990199 | G/C | cca | TGCATAT | − | 0.39 | C: 61% | C: 89% | C: 51% | C: | C: 48% | C: |
| | | variant, | | | | | | | CTTCCTA | | | G: 39% | G: 11% | G: 49% | 57% | G: 52% | 49% |
| | | 640 bp | | | | | | | TGCTCC | | | | | | G: | | G: |
| | | from | | | | | | | | | | | | | 43% | | 51% |
| | | exon 13 | | | | | | | | | | | | | | | |
| | | Intronic | | | 136,060,125- | rs6894815 | G/C | ccc | GAGACTG | − | 0.42 | C: 58% | C: 76% | C: 50% | C: | C: 48% | C: |
| | | variant, | | | | | | | AGACTGA | | | G: 42% | G: 24% | G: 50% | 57% | G: 52% | 49% |
| | | 659 bp | | | | | | | AGACAG | | | | | | G: | | G: |
| | | from | | | | | | | | | | | | | 43% | | 51% |
| | | exon 14 | | | | | | | | | | | | | | | |
| | | Intronic | | | 136,060,553- | rs1006447 | T/G | cgg | TGCCTGT | + | 0.42 | T: 42% | T: 23% | T: 50% | T: | T: 52% | T: |
| | | variant, | | | | 8 | | | AATCACA | | | G: 58% | G: 77% | G: 50% | 43% | G: 48% | 51% |
| | | 230 bp | | | | | | | GCTACT | | | | | | G: | | G: |
| | | from | | | | | | | | | | | | | 57% | | 49% |
| | | exon 14 | | | | | | | | | | | | | | | |
| Exon | 14 | | 136,060,834 | 136,060,936 | | | | | | | | | | | | | |
| Intron | 14 | Intronic | 136,060,937 | 136,061,499 | 136,060,903- | rs6880837 | T/C | cca | TCTCTCC | − | 0.41 | T: 41% | T: 24% | T: 49% | T: | T: 50% | T: |
| | to | variant, | | | | | | | ACCAACT | | | C: 59% | C: 76% | C: 51% | 41% | C: 50% | 48% |
| | 15 | 44 bp | | | | | | | GCCACA | | | | | | C: | | C: |
| | | from | | | | | | | | | | | | | 59% | | 52% |
| | | exon 14 | | | | | | | | | | | | | | | |
| Exon | 15 | | 136,061,500 | 136,061,579 | | | | | | | | | | | | | |
| Intron | 15 | | 136,061,580 | 136,062,662 | | | | | | | | | | | | | |
| | to | | | | | | | | | | | | | | | | |
| | 16 | | | | | | | | | | | | | | | | |
| Exon | 16 | | 136,062,663 | 136,062,687 | | | | | | | | | | | | | |
| Intron | 16 | | 136,062,688 | 136,063,185 | | | | | | | | | | | | | |
| | to | | | | | | | | | | | | | | | | |
| | 17 | | | | | | | | | | | | | | | | |
| Exon | 17 | | 136,063,817 | 136,063,185 | | | | | | | | | | | | | |

### Confirming Allele-Specific Indels

[0089] EBV transformation of lymphocytes: A sample of 5 ml of whole blood was taken and place in a sterile 50 ml Falcon tube. An equal volume of RPMI media containing 20% foetal calf serum was added to the whole blood—mix by gently inverting the tube. 6.25 ml of Ficoll-Paque PLUS (GE Healthcare cat no. 17-1440-02) was placed in a separate sterile 50 ml Falcon tube. 10 ml of blood/media mix was added to the Ficoll-Paque. The tube was spun at 2000 rpm for 20 min at room temperature. The red blood cells formed at the bottom of the tube above which was the Ficoll layer. The lymphocytes formed a layer on top of the Ficoll layer, while the top layer was the medium. A clean sterile Pastette was inserted to draw off the lymphocytes, which were placed in a sterile 15 ml Falcon tube. The lymphocytes were centrifuged and washed. EBV aliquot was thawed and added to resuspended lymphocytes, and the mixture was incubated for 1 hour at 37 degrees C. (infection period). RPMI, 20% FCS media and 1 mg/ml phytohaemagglutinin were added to EBV treated lymphocytes, and the lymphocytes were placed on a 24-well plate.

[0090] Electroporation of EBV Transformed Lymphocytes (LCLs): CRISPR constructs (with either GFP or mCherry co-expressed) were added to suspended EBV transformed lymphocytes cells, and the mixture was transferred to an electroporation cuvette. Electroporation was performed, and 500 μl pre-warmed RPMI 1640 media containing 10% FBS was added to the cuvette. The contents of the cuvette was transferred to a 12 well plate containing the remainder of the pre-warmed media, and 6 hours post nucleofection, 1 ml of media was removed and was replaced with fresh media.

[0091] Cell sorting of GFP+ and/or mCherry+ Live cells: 24 hours post nucleofection, 1 ml of media was removed and the remaining media containing cells was collected in a 1.5 ml Eppendorf. The cells were centrifuged and resuspended in 200 ul PBS add 50 ul eFlouro 780 viability stain at 1:1000 dilution. After another centrifuge, the cells were resuspended in filter sterile FACS buffer containing 1×HBSS (Ca/Mg++ free), 5 mM EDTA, 25 mM HEPES pH 7.0, 5% FCS/FBS (Heat-Inactivated) and 10 units/mL DNase II. Cells were sorted to isolate live GFP+ and/or mCherry+ cells and were collected in RPMI+20% FBS. Cells were expanded, and DNA was extracted from the cells.

[0092] Isolation of single alleles for sequencing: QIAmp DNA Mini Kit (Qiagen) was used to isolate DNA, PCR was used across the region targeted by CRISPR/Cas9. Specific amplification was confirmed by gel electrophoresis, and the PCR product was purified. The PCR product was blunt ended and ligated into pJET1.2/blunt plasmid from the Clonejet Kit (Thermo Scientific). The ligation mixture was transformed into competent DH5α cells. Single colonies were picked, and Sanger Sequencing was performed to confirm edits. The resulting data is shown in FIG. 5.

### Dual-Cut Approach

[0093] Two CRISPR plasmids were transfected into the lymphocyte cell lines (LCLs), one tagged with mCherry the other tagged with GFP. Positive cells were sorted for both mCherry and GFP, collecting 2.6% of the total population. The cells were then allowed to repair and expand, and the genomic DNA was isolated (FIG. 6). The dual-cut was indeed detected as shown in FIG. 7. Additional exemplary common guides in intronic regions of TGFBI gene, which may be used to treat corneal dystrophies, are listed in FIGS. 8-23.

[0094] TGFBI gene editing: SNPs across the TGFBI locus suitable for ASNIP gene editing were identified as shown in FIG. 24 (section a). We identified a small set of targets within the TGFBI locus that are common to many TGFBI patients. All ASNIP SNPs were in intronic regions that do not code, so a single cut here was predicted to have no functional effect as the sequence required to produce the TGFBI protein will still be intact.

[0095] Out of SNPs containing a PAM on only one allele (FIG. 37), SNPs associated with a PAM on only one allele that lie in cis with the patient's R124H mutations were identified (FIG. 38). Various SNPs were tested as targets for Cas9/sgRNA in an in vitro cleavage assay demonstrated both on-target activity and specificity for one version of the SNP (allele) as shown in FIG. 24 (section b). Each SNP (rs72794904, rs2282790, rs1989972, rs6894815) generated a novel PAM on the same allele in which the disease-causing mutation is present. For each SNP, an in vitro digestion was performed. DNA templates were generated containing the sequence of either allele (one has a novel PAM present the other has no PAM), and this sequence was digested with Cas9 protein complexed with the targeting sgRNA. Guide sequences for the tested targets are shown in Table 3.

TABLE 3
Guide Sequences for Selected Target Mutations

| SNP | Guide Sequences (5′-3′) |
|---|---|
| rs72794904 | GGATCTATACCATGTGGGCT |
| rs2282790 | TAGCAGTGCCAAGTAACTGA |
| rs1989972 | AGGGCTGTATTACTGGGGCT |
| rs2073509 | GTGTGTGGCTGCAGCAGCAC |
| rs2073511 | GGAGAGGAGCTTAGACAGCG |
| rs6860369 | CAAATCAGGAGGCCCCTCGT |
| rs6893691 | AATCTCCCTGGCTGCACCTG |
| rs6894815 | GAGACTGAGACTGAAGACAG |
| rs10064478 | TGCCTGTAATCACAGCTACT |
| rs11956252 | CATCGCCTCCCCAAGTGATG |
| rs7725702 | AACTGAGAAAGGTCACCCCT |
| rs4976470 | CCCGTGACATGTGGGGATTA |

[0096] After incubation, digestion products were run on an agarose gel to see the cutting activity of each guide and specificity between the two alleles and intensity of the digested products revealed the in vitro specificity of each guide. Of the 12 ASNIP guides tested, 8 appeared to preferentially cleave the PAM associated allele while 4 appeared to have little activity at either the ‘PAM associated’ or ‘No PAM’ allele. SNPs generating a non-canonical PAM, which is a PAM sequence other than NGG that can still act as a weak PAM for S. pyogenes Cas9 such as NAG or NGA on the ‘No PAM present’ allele, only conferred partial discrimination at best.

[0097] 5′-NAG-3′ can act as a non-canonical PAM (i.e. it is NOT equal to the wild-type 5′-NGG-3′ PAM but when present it can act as a PAM with a lower frequency). Although the tested SNP generated a PAM, if a non-canonical PAM is on the ‘no PAM allele,’ then cleave can happen on the ‘no PAM allele,’ even though the ‘no PAM allele’ does not include the 5′-NGG-3′ PAM. Indeed, in the in vitro digests, when a non-canonical PAM (NAG/NGA) was present, discrimination was poor. But when NGT/NTG/NGC/NCG was present on the ‘no PAM allele,’ better discrimination was obtained with Cas9.

[0098] On-target activity and specificity was confirmed in a cell line derived from a GCD2 patient with a R124H TGFBI mutation as shown in FIG. 24 (section c). Specifically, each of the same guides (rs72794904, rs2282790, rs1989972, rs6860369, rs6894815, rs10064478, rs11956252, rs7725702, rs4976470) was complexed with Cas9 and this complex was transfected into a lymphocyte cell line generated from a R124H GCD2 corneal dystrophy patient. Genomic DNA was extracted from these cells 48 hours later. The region targeted by Cas9 was amplified and sent for next generation sequencing (NGS). Deletion of the intervening sequence was demonstrated between pairs of the SNPs when cells were treated with pairs of SNP-targeting sgRNAs. With each guide, more than 92% of the indels occurred on the allele with the novel PAM (FIG. 25, section a) On average, in the 9 guides tested 96.3% indels occurred on the allele with the novel PAM while only 3.7% of the indels occurred on the ‘no PAM allele.’ The results showed that all 9 guides were highly specific for the mutant allele, including even those containing a non-canonical PAM on the ‘no PAM allele.’

[0099] In addition, ASNIP guide rs6860369 was inactive in the in vitro screen but was active in a cell line. For 8 out 9 ASNIP guides tested, the predominant indels observed were 1 or 2 bp insertions, which occurred 3 or 4 bp upstream of the PAM (FIG. 25, section b).

[0100] FIG. 26 indicates the sizes of the exons (coding) and introns (non-coding) in base pairs. Most of the original ASNIP guides were a substantial distance apart. FIG. 26 illustrates locations of additional common-intronic guides, CI-1 through CI-4, that were tested. The additional common-intronic guides, CI-1 through CI-4, will cut both alleles, but will be used alongside an allele-specific ASNIP guide. Thus, a dual-cut that will have a functional effect will only occur when both cuts happen in the same cell. FIG. 27 depicts six different dual combinations tested.

[0101] DNA extracted from the R124H cells transfected with various dual combinations was subjected to qPCR, normalized to a non-targeted gene elsewhere in the genome and to the untreated cell line. Any reduction in PCR product in the treated cells would be indicative of productive deletion.

[0102] The left illustration in FIG. 28, for example, is a diagram showing where the guides are in relation to each other and how the assay to detect the presence of the dual cut works. For dual combination 1, shown in FIG. 28, the two PAM sites were 202 bp apart. The arrows indicate a PCR reaction and correspond to on the graph on the right. For PCR “1” shown by red it amplifies target region 1 and PCR “2” amplifies target region 2 and PCR “3” amplifies the expected dual cut, therefore due to amplification distance we should only get a product if the dual cut occurred. The top graph on the right shows cells transfected with 2 SNPs for each guide. PCR 1 was reduced by 39% compared to UNT (PCR3) and PCR 2 was reduced by 33%. To increase the dual cut frequency, a 100 base ssODN comprising 50 bases of sequence from either side of the expected deletion was included to accommodate the cell to repair its cut DNA and make a productive edit. Inclusion of the 50-50 bp ssODN reduced the amount of product from PCR 1 and PCR 2 further suggesting an increase in deletion frequency. PCR 1 was now reduced compared to the UNT by 45% and PCR 2 was reduced by 57%.

[0103] In FIG. 29, PCR 1 was reduced by 22% compared to UNT and PCR 2 was reduced by 31%. With the 50-50 bp ssODN, PCR 1 was reduced compared to the UNT by 53% and PCR 2 was reduced by 33%. In FIG. 30, PCR 1 was reduced by 36% compared to UNT and PCR 2 was reduced by 27%. With the 50-50 bp ssODN, PCR 1 was reduced compared to the UNT by 55% and PCR 2 was reduced by 50%. In FIG. 31, PCR 1 was reduced by 42% compared to UNT and PCR 2 was reduced by 34%. With the 50-50 bp ssODN, PCR 1 was NOT reduced compared to the UNT (41%) and PCR 2 was reduced by 52%. In FIG. 32, PCR 1 was reduced by 55% compared to UNT and PCR 2 was reduced by 44%. With the 50-50 bp ssODN, PCR 1 was reduced compared to the UNT by 62% and PCR 2 was reduced by 54%. In FIG. 33, PCR 1 was reduced by 51% compared to UNT and PCR 2 was reduced by 34%. With the 50-50 bp ssODN, PCR 1 was reduced compared to the UNT by 64% and PCR 2 was reduced by 50%. These data support that the frequency of deletions was enhanced by the addition of deletion spanning (50+50 bp) single-stranded oligonucleotides as shown in FIG. 34. In summary, for the 6 dual combinations tested, in a range of 400-4000 bp apart, none appeared to be notably more efficient. However, in all cases, addition of the 50-50 bp ssODN improved the efficiency of the dual cut.

[0104] In some embodiments, a ssODN having a different length (more than 100, such as at least 110 bp, at least 120 bp, at least 130 bp, etc., or less than 100 bp, such as at most 90 bp, at most 80 bp, at most 70 bp, at most 60 bp, at most 50 bp, at most 40 bp) is used.

[0105] While it was hypothesized that the larger the distance between the dual-guides, the less frequent the deletion would be (as shown in FIG. 34, section b), the deletion frequency remains relatively stable for the distances tested (all dual-combinations used are shown in FIG. 39), ranging from 419 bp to 63,428 bp, (FIG. 34, sections d and e).

[0106] In some cases, the target SNPs described (Table 1) lie substantial distances apart, up to >18 kb (FIG. 40). Additional guides that lie closer to a particular ASNIP guide are used. These additional guides further facilitate excision of exons (FIG. 41) in case the efficiency of deletion drops with the increasing intervening distance. In contrast to the PAM discriminatory guides, these guides are not allele-specific, as they were selected to target the intronic region of both alleles (FIG. 34, section c). The ASNIP guide cuts the mutant allele only while the common-intronic guide cuts both alleles. On the mutant allele when both cuts are made on that chromosome, the region between these cuts may be deleted, while on the wild-type allele, a cut should only occur with the common-intronic guide which at most results in a small indel and should have no functional effect (FIG. 35). The efficiency of the dual-cut was assessed in cells transfected with pairs of RNP complexes; dual combinations with a maximum difference of <3.5 kb, ranging in size from 602 bp to 4008 bp were tested (FIG. 42), in line with previous results we found that small increments in distance had no significant effect on the efficiency of the deletion. On average the reduction of PCR 1 and PCR 2, and hence deletion, when compared to untreated samples, was 38.87%±6.34% for PCR 1 (FIG. 34, section d, shown in blue) and 33.64%±2.76% for PCR 2 (FIG. 34, section e, shown in blue); the variation between reduction efficiencies was not significant and can be attributed to the fact that not all guide sequences perform at equal efficiencies.

[0107] DNA extracted from the R124H cells transfected with various dual combinations was subjected to end point PCR using the PCR 1 forward primer and PCR 2 reverse primer. If the region between the two guides is excised, the PCR will produce band of sizes shown in the table in the right column. As shown in FIG. 36, on the gel, in the untreated lanes, no band of the correct size appeared. However, in the treated samples, bands of the correct size did appear which are indicated by the boxes. The results support that the dual cut indeed occurred.

### Example Materials and Methods

[0108] DNA extraction from whole blood and SNP genotyping: DNA was extracted from control blood using the Gentra Puregene Blood Kit (Qiagen) and quantified using a nanodrop. Region of interest was PCR amplified using primer pairs listed in FIG. 38, the PCR product was then purified with the Wizard® PCR Preps DNA Purification System (Promega) and sequenced to determine genotype.

[0109] Phased sequencing of R124H patient genome: Genomic DNA was extracted from 3 ml of whole blood with a MagAttract HMW DNA kit (QIAGEN, Hilden, Germany). DNA fragment lengths of approximately 45 kb were enriched for on a Blue Pippen pulsed field electrophoresis instrument (Sage Science, Beverly, Mass., USA). Fragment sizes averaging 51,802 bps were confirmed with a Large Fragment kit on the Fragment Analyzer (Advanced Analytical, Ankeny, Iowa, USA). This high molecular weight (HMW) DNA (1 ng) was partitioned across approximately 1 million synthetic barcodes (GEMs) on a microfluidic Genome Chip with A Chromium™ System (10× Genomics, Pleasanton, Calif., USA) according to the manufacturer's protocol. Upon dissolution of the Genome Gel Bead in the GEM, HMW DNA fragments with 16-bp 10× Barcodes along with attached sequencing primers were released. A standard library prep was performed according to the manufacturer's instructions resulting in sample-indexed libraries using 10× Genomics adaptors. Prior to Illumina bridge amplification and sequencing, the libraries were analyzed on the Fragment Analyzer with the high sensitivity NGS kit. One lane of whole genome paired end short read (2×150 nt) sequencing was conducted on a HiSeq 4000 (Illumina, San Diego, Calif., USA). The FASTQ files served as input into Long Ranger (10× Genomics) which was used to assemble, align and give haplotype phasing information.

[0110] In vitro digestion to determine on-target specificity: A double-stranded DNA template was prepared by amplifying a region of the luciferase reporter plasmid containing the desired sequence using the primers listed in FIG. 38.

[0111] A cleavage reaction was set up by incubating 30 nM S. pyogenes Cas9 nuclease (NEB UK) with 30 nM synthetic sgRNA (Synthego) for 10 minutes at 25° C. The Cas9:sgRNA complex was then incubated with 3 nM of DNA template at 37° C. for 1 hour. Fragment analysis was then carried out on a 1% agarose gel.

[0112] Preparation of primary human PBMCs: A whole blood sample was collected from a patient with Avellino corneal dystrophy. PBMCs were isolated by centrifugation on a Ficoll density gradient. PBMCs were washed in RPMI 1640 media containing 20% FBS and incubated with EBV at 37° C. for 1 hour. After infection RPMI 1640 containing 20% FBS was added to a total volume of 3 ml and 40 μl of 1 mg/ml phytohaemagglutinin was added. 1.5 ml of the lymphocyte mixture was added to two wells of a 24-well plate and allowed to aggregate. Lymphoblastoids were cultured in RPMI 1640 media containing 20% FBS.

[0113] Nucleofection of LCLs with RNPs: S. pyogenes Cas9 nuclease (NEB) and modified synthetic sgRNAs (Synthego) were complexed to form RNPs. RNPs were formed directly in the Lonza Nucleofector SF solution (SF Cell line 4D-Nucleofector X kit—Lonza), and incubated for 10 minutes at room temperature. Desired number of cells were spun down (300 g×5 mins) and resuspended in Nucleofector solution. 5 μl of each cell solution was added to 25 μL of corresponding preformed RNPs, mixed and transferred to the nucleofector 16-well strip. The cells were electroporated using the 4D Nucleofector (Lonza) and program DN-100, cells were allowed to recover at room temperature for 5 mins and 70 μl of pre-warmed media was added to each well of Lonza strip to help recovery. The transfected cells were then transferred to 24-well plate with 200 μl media. After 48 hrs of incubation at 37° C., gDNA was extracted using the QIAmp DNA Mini Kit (Qiagen), the target region was PCR amplified using primer pairs listed in FIG. 38 and sequencing data was analysed using Synthego's ICE tool.

[0114] Quantitative PCR: RT-qPCRs were performed using 1× LightCycler 480 SYBR Green I Master (Roche), 10 μM primers and 10 ng gDNA. Reactions were run on the LightCycler 480 II (Roche), with an initial incubation step of 95° C., 10 minutes; followed by 45 cycles of 95° C. for 10 seconds, 60° C. for 10 seconds and 72° C. for 10 seconds. Expression was normalized to β-actin, and relative expression was determined using the ΔΔCT method.

1. A method of altering expression of a gene product, the method comprising:
administering into a cell an engineered CRISPR/Cas9 system comprising at least one vector comprising:
(i) a nucleotide molecule encoding Cas9 nuclease;
(ii) a first sgRNA comprising a first CRISPR targeting RNA (crRNA) sequence that hybridizes to a nucleotide sequence complementary to a first target sequence, the first target sequence being adjacent to the 5′-end of a first protospacer adjacent motif (PAM) in a first intron at 3′-end side of an exon comprising a disease-causing mutation or SNP in cis, wherein the first target sequence or the first PAM comprises a first ancestral variation or SNP site; and
(iii) a second sgRNA comprising a second crRNA sequence that hybridizes to a nucleotide sequence complementary to a second target sequence, the second target sequence being adjacent to the 5′-end of a second PAM in a second intron at 5′-end side of the exon comprising the disease-causing mutation or SNP in cis, wherein the second target sequence or the second PAM comprises a second ancestral variation or SNP site,
wherein the at least one vector does not have a nucleotide molecule encoding Cas9 nuclease and a crRNA sequence that naturally occur together.

2. The method of claim 1, wherein at least one of the first and second crRNA sequences comprises a nucleotide sequence selected from the group consisting of guide sequences shown in Table 3.

3. The method of claim 1, wherein
the first crRNA sequence comprises the first target sequence;
the second crRNA sequence comprises the second target sequence;
the first crRNA sequence is from 17 to 24 nucleotide long; and/or
the second crRNA sequence is from 17 to 24 nucleotide long.

4. The method of claim 1, wherein the first and/or second PAMs and the Cas9 nuclease are from Streptococcus or Staphylococcus.

5. The method of claim 1, wherein the first and second PAMs are both from Streptococcus or Staphylococcus.

6. The method of claim 1, wherein each of the first and second PAMs independently consists of NGG or NNGRRT, wherein N is any of A, T, G, and C, and R is A or G.

7. The method of claim 1, wherein the administering comprises injecting the engineered CRISPR/Cas9 system into the cell.

8. The method of claim 1, wherein the administering comprises introducing the engineered CRISPR/Cas9 system into a cell containing and expressing a DNA molecule having the target sequence.

9. The method of claim 1, wherein
the disease is associated with the SNP;
the first target sequence or the first PAM comprises the first ancestral SNP site; and/or
the second target sequence or the second PAM comprises the second ancestral SNP site.

10. The method of claim 1, wherein the target sequence or the PAM comprises a plurality of mutation or SNP sites.

11. The method of claim 1, including:
administering the engineered CRISPR/Cas9 system into a subject.

12. The method of claim 11, wherein the subject is a human.

13. The method of claim 11, further comprising:
prior to administering to the subject the engineered CRISPR/Cas9 system:
obtaining sequence information of the subject; and
selecting the first crRNA sequence and/or the second crRNA sequence based on the sequence information of the subject.

14. The method of claim 13, wherein:
the sequence information of the subject includes whole-genome sequence information of the subject.

15. The method of claim 1, wherein:
the first crRNA sequence hybridizes to the nucleotide sequence so that the Cas9 nuclease cleaves at a first cleaving site that is adjacent to the first ancestral variation or SNP site; and/or
the second crRNA sequence hybridizes to the nucleotide sequence so that the Cas9 nuclease cleaves at a second cleaving site that is adjacent to the second ancestral variation or SNP site.

16. The method of claim 15, wherein:
the first crRNA sequence hybridizes to the nucleotide sequence so that the Cas9 nuclease cleaves only at the first cleaving site that is adjacent to the first ancestral variation or SNP site; and/or
the second crRNA sequence hybridizes to the nucleotide sequence so that the Cas9 nuclease cleaves only at the second cleaving site that is adjacent to the second ancestral variation or SNP site.

17. The method of claim 1, wherein:
the first crRNA sequence hybridizes to the nucleotide sequence complementary to the first target sequence in trans with the disease-causing mutation or SNP, said first target sequence in trans not being adjacent to the 5′-end of a PAM; and/or
the second crRNA sequence hybridizes to the nucleotide sequence complementary to the second target sequence in trans with the disease-causing mutation or SNP, said second target sequence in trans not being adjacent to the 5′-end of a PAM.

18. The method of claim 1, wherein:
the first crRNA sequence hybridizes to the nucleotide sequence complementary to the first target sequence in trans with the disease-causing mutation or SNP, said first target sequence in trans not being adjacent to the 5′-end of a PAM; and
the second crRNA sequence hybridizes to the nucleotide sequence complementary to the second target sequence in trans with the disease-causing mutation or SNP, said second target sequence in trans being adjacent to the 5′-end of a PAM.

19. The method of claim 1, wherein:
the first crRNA sequence hybridizes to the nucleotide sequence complementary to the first target sequence in trans with the disease-causing mutation or SNP, said first target sequence in trans being adjacent to the 5′-end of a PAM; and
the second crRNA sequence hybridizes to the nucleotide sequence complementary to the second target sequence in trans with the disease-causing mutation or SNP, said second target sequence in trans not being adjacent to the 5′-end of a PAM.

The application's sequence listing, which the Patent Office published only in electronic form, follows.

SEQUENCE LISTING (4832 sequences)

SEQ ID NO: 1 - RNA, 102 nt, Artificial Sequence
  Description of Artificial Sequence: Synthetic polynucleotide
  modified_base (1)..(20): a, c, u, g, unknown or other
nnnnnnnnnnnnnnnnnnnnguuuuagagcuagaaauagcaaguuaaaauaaggcuaguccguuaucaacuugaaaaaguggcaccgagucggugcuuuuuu

SEQ ID NO: 2 - RNA, 82 nt, Artificial Sequence
  Description of Artificial Sequence: Synthetic oligonucleotide
guuuuagagcuagaaauagcaaguuaaaauaaggcuaguccguuaucaacuugaaaaaguggcaccgagucggugcuuuuuu

SEQ ID NO: 3 - DNA, 3974 bp, Streptococcus pyogenes
atggactataaggaccacgacggagactacaaggatcatgatattgattacaaagacgatgacgataagatggccccaaagaagaagcggaaggtcggtatccacggagtcccagcagccgacaagaagtacagcatcggcctggacatcggcaccaactctgtgggctgggccgtgatcaccgacgagtacaaggtgcccagcaagaaattcaaggtgctgggcaacaccgaccggcacagcatcaagaagaacctgatcggagccctgctgttcgacagcggcgaaacagccgaggccacccggctgaagagaaccgccagaagaagatacaccagacggaagaaccggatctgctatctgcaagagatcttcagcaacgagatggccaaggtggacgacagcttcttccacagactggaagagtccttcctggtggaagaggataagaagcacgagcggcaccccatcttcggcaacatcgtggacgaggtggcctaccacgagaagtaccccaccatctaccacctgagaaagaaactggtggacagcaccgacaaggccgacctgcggctgatctatctggccctggcccacatgatcaagttccggggccacttcctgatcgagggcgacctgaaccccgacaacagcgacgtggacaagctgttcatccagctggtgcagacctacaaccagctgttcgaggaaaaccccatcaacgccagcggcgtggacgccaaggccatcctgtctgccagactgagcaagagcagacggctggaaaatctgatcgcccagctgcccggcgagaagaagaatggcctgttcggaaacctgattgccctgagcctgggcctgacccccaacttcaagagcaacttcgacctggccgaggatgccaaactgcagctgagcaaggacacctacgacgacgacctggacaacctgctggcccagatcggcgaccagtacgccgacctgtttctggccgccaagaacctgtccgacgccatcctgctgagcgacatcctgagagtgaacaccgagatcaccaaggcccccctgagcgcctctatgatcaagagatacgacgagcaccaccaggacctgaccctgctgaaagctctcgtgcggcagcagctgcctgagaagtacaaagagattttcttcgaccagagcaagaacggctacgccggctacattgacggcggagccagccaggaagagttctacaagttcatcaagcccatcctggaaaagatggacggcaccgaggaactgctcgtgaagctgaacagagaggacctgctgcggaagcagcggaccttcgacaacggcagcatcccccaccagatccacctgggagagctgcacgccattctgcggcggcaggaagatttttacccattcctgaaggacaaccgggaaaagatcgagaagatcctgaccttccgcatcccctactacgtgggccctctggccaggggaaacagcagattcgcctggatgaccagaaagagcgaggaaaccatcaccccctggaacttcgaggaagtggtggacaagggcgcttccgcccagagcttcatcgagcggatgaccaacttcgataagaacctgcccaacgagaaggtgctgcccaagcacagcctgctgtacgagtacttcaccgtgtataacgagctgaccaaagtgaaatacgtgaccgagggaatgagaaagcccgccttcctgagcggcgagcagaaaaaggccatcgtggacctgctgttcaagaccaaccggaaagtgaccgtgaagcagctgaaagaggactacttcaagaaaatcgagtgcttcgactccgtggaaatctccggcgtggaagatcggttcaacgcctccctgggcacataccacgatctgctgaaaattatcaaggacaaggacttcctggacaatgaggaaaacgaggacattctggaagatatcgtgctgaccctgacactgtttgaggacagagagatgatcgaggaacggctgaaaacctatgcccacctgttcgacgacaaagtgatgaagcagctgaagcggcggagatacaccggctggggcaggctgagccggaagctgatcaacggcatccgggacaagcagtccggcaagacaatcctggatttcctgaagtccgacggcttcgccaacagaaacttcatgcagctgatccacgacgacagcctgacctttaaagaggacatccagaaagcccaggtgtccggccagggcgatagcctgcacgagcacattgccaatctggccggcagccccgccattaagaagggcatcctgcagacagtgaaggtggtggacgagctcgtgaaagtgatgggccggcacaagcccgagaacatcgtgatcgaaatggccagagagaaccagaccacccagaagggacagaagaacagccgcgagagaatgaagcggatcgaagagggcatcaaagagctgggcagccagatcctgaaagaacaccccgtggaaaacacccagctgcagaacgagaagctgtacctgtactacctgcagaatgggcgggatatgtacgtggaccaggaactggacatcaaccggctgtccgactacgatgtggaccatatcgtgcctcagagctttctgaaggacgactccatcgacaacaaggtgctgaccagaagcgacaagaaccggggcaagagcgacaacgtgccctccgaagaggtcgtgaagaagatgaagaactactggcggcagctgctgaacgccaagctgattacccagagaaagttcgacaatctgaccaaggccgagagaggcggcctgagcgaactggataaggccggcttcatcaagagacagctggtggaaacccggcagatcacaaagcacgtggcacagatcctggactcccggatgaacactaagtacgacgagaatgacaagctgatccgggaagtgaaagtgatcaccctgaagtccaagctggtgtccgatttccggaaggatttccagttttacaaagtgcgcgagatcaacaactaccaccacgcccacgacgcctacctgaacgccgtcgtgggaaccgccctgatcaaaaagtaccctaagctggaaagcgagttcgtgtacggcgactacaaggtgtacgacgtgcggaagatgatcgccaagagcgagcaggaaatcggcaaggctaccgccaagtacttcttctacagcaacatcatgaactttttcaagaccgagattaccctggccaacggcgagatccggaagcggcctctgatcgagacaaacggcgaaaccggggagatcgtgtgggataagggccgggattttgccaccgtgcggaaagtgctgagcatgccccaagtgaatatcgtgaaaaagaccgaggtgcagacaggcggcttcagcaaagagtctatcctgcccaagaggaacagcgataagctgatcgccagaaagaaggactgggaccctaagaagtacggcggcttcgacagccccaccgtggcctattctgtgctggtggtggccaaagtggaaaagggcaagtccaagaaactgaagagtgtgaaagagctgctggggatcaccatcatggaaagaagcagcttcgagaagaatcccatcgactttctggaagccaagggctacaaagaagtgaaaaaggacctgatcatcaagctgcctaagtactccctgttcgagctggaaaacggccggaagagaatgctggcctctgccggcgaactgcagaagggaaacgaactggccctgccctccaaatatgtgaacttcctgtacctggccagccactatgagaagctgaagggctcccccgaggataatgagcagaaacagctgtttgtggaacagcacaagcactacctggacgagatcatcgagcagatcagcgagttctccaagagagtgatcctggccgacgctaa

SEQ ID NO: 4 - protein, 1423 aa, Streptococcus pyogenes
MDYKDHDGDYKDHDIDYKDDDDKMAPKKKRKVGIHGVPAADKKYSIGLDIGTNSVGWAVITDEYKVPSKKFKVLGNTDRHSIKKNLIGALLFDSGETAEATRLKRTARRRYTRRKNRICYLQEIFSNEMAKVDDSFFHRLEESFLVEEDKKHERHPIFGNIVDEVAYHEKYPTIYHLRKKLVDSTDKADLRLIYLALAHMIKFRGHFLIEGDLNPDNSDVDKLFIQLVQTYNQLFEENPINASGVDAKAILSARLSKSRRLENLIAQLPGEKKNGLFGNLIALSLGLTPNFKSNFDLAEDAKLQLSKDTYDDDLDNLLAQIGDQYADLFLAAKNLSDAILLSDILRVNTEITKAPLSASMIKRYDEHHQDLTLLKALVRQQLPEKYKEIFFDQSKNGYAGYIDGGASQEEFYKFIKPILEKMDGTEELLVKLNREDLLRKQRTFDNGSIPHQIHLGELHAILRRQEDFYPFLKDNREKIEKILTFRIPYYVGPLARGNSRFAWMTRKSEETITPWNFEEVVDKGASAQSFIERMTNFDKNLPNEKVLPKHSLLYEYFTVYNELTKVKYVTEGMRKPAFLSGEQKKAIVDLLFKTNRKVTVKQLKEDYFKKIECFDSVEISGVEDRFNASLGTYHDLLKIIKDKDFLDNEENEDILEDIVLTLTLFEDREMIEERLKTYAHLFDDKVMKQLKRRRYTGWGRLSRKLINGIRDKQSGKTILDFLKSDGFANRNFMQLIHDDSLTFKEDIQKAQVSGQGDSLHEHIANLAGSPAIKKGILQTVKVVDELVKVMGRHKPENIVIEMARENQTTQKGQKNSRERMKRIEEGIKELGSQILKEHPVENTQLQNEKLYLYYLQNGRDMYVDQELDINRLSDYDVDHIVPQSFLKDDSIDNKVLTRSDKNRGKSDNVPSEEVVKKMKNYWRQLLNAKLITQRKFDNLTKAERGGLSELDKAGFIKRQLVETRQITKHVAQILDSRMNTKYDENDKLIREVKVITLKSKLVSDFRKDFQFYKVREINNYHHAHDAYLNAVVGTALIKKYPKLESEFVYGDYKVYDVRKMIAKSEQEIGKATAKYFFYSNIMNFFKTEITLANGEIRKRPLIETNGETGEIVWDKGRDFATVRKVLSMPQVNIVKKTEVQTGGFSKESILPKRNSDKLIARKKDWDPKKYGGFDSPTVAYSVLVVAKVEKGKSKKLKSVKELLGITIMERSSFEKNPIDFLEAKGYKEVKKDLIIKLPKYSLFELENGRKRMLASAGELQKGNELALPSKYVNFLYLASHYEKLKGSPEDNEQKQLFVEQHKHYLDEIIEQISEFSKRVILADANLDKVLSAYNKHRDKPIREQAENIIHLFTLTNLGAPAAFKYFDTTIDRKRYTSTKEVLDATLIHQSITGLYETRIDLSQLGGDKRPAATKKAGQAKKKK

SEQ ID NO: 5 - RNA, 105 nt, Artificial Sequence
  Description of Artificial Sequence: Synthetic polynucleotide
  modified_base (2)..(22): a, c, u, g, unknown or other
gnnnnnnnnnnnnnnnnnnnnnguuuuaguacucuggaaacagaaucuacuaaaacaaggcaaaugccguguuuaucucgucaacuuguuggcgaagauuuuuuu

SEQ ID NO: 6 - RNA, 83 nt, Artificial Sequence
  Description of Artificial Sequence: Synthetic oligonucleotide
guuuuaguacucuggaaacagaaucuacuaaaacaaggcaaaugccguguuuaucucgucaacuuguuggcgaagauuuuuuu

SEQ ID NO: 7 - DNA, 3345 bp, Staphylococcus aureus
atggccccaaagaagaagcggaaggtcggtatccacggagtcccagcagccaagcggaactacatcctgggcctggacatcggcatcaccagcgtgggctacggcatcatcgactacgagacacgggacgtgatcgatgccggcgtgcggctgttcaaagaggccaacgtggaaaacaacgagggcaggcggagcaagagaggcgccagaaggctgaagcggcggaggcggcatagaatccagagagtgaagaagctgctgttcgactacaacctgctgaccgaccacagcgagctgagcggcatcaacccctacgaggccagagtgaagggcctgagccagaagctgagcgaggaagagttctctgccgccctgctgcacctggccaagagaagaggcgtgcacaacgtgaacgaggtggaagaggacaccggcaacgagctgtccaccaaagagcagatcagccggaacagcaaggccctggaagagaaatacgtggccgaactgcagctggaacggctgaagaaagacggcgaagtgcggggcagcatcaacagattcaagaccagcgactacgtgaaagaagccaaacagctgctgaaggtgcagaaggcctaccaccagctggaccagagcttcatcgacacctacatcgacctgctggaaacccggcggacctactatgagggacctggcgagggcagccccttcggctggaaggacatcaaagaatggtacgagatgctgatgggccactgcacctacttccccgaggaactgcggagcgtgaagtacgcctacaacgccgacctgtacaacgccctgaacgacctgaacaatctcgtgatcaccagggacgagaacgagaagctggaatattacgagaagttccagatcatcgagaacgtgttcaagcagaagaagaagcccaccctgaagcagatcgccaaagaaatcctcgtgaacgaagaggatattaagggctacagagtgaccagcaccggcaagcccgagttcaccaacctgaaggtgtaccacgacatcaaggacattaccgcccggaaagagattattgagaacgccgagctgctggatcagattgccaagatcctgaccatctaccagagcagcgaggacatccaggaagaactgaccaatctgaactccgagctgacccaggaagagatcgagcagatctctaatctgaagggctataccggcacccacaacctgagcctgaaggccatcaacctgatcctggacgagctgtggcacaccaacgacaaccagatcgctatcttcaaccggctgaagctggtgcccaagaaggtggacctgtcccagcagaaagagatccccaccaccctggtggacgacttcatcctgagccccgtcgtgaagagaagcttcatccagagcatcaaagtgatcaacgccatcatcaagaagtacggcctgcccaacgacatcattatcgagctggcccgcgagaagaactccaaggacgcccagaaaatgatcaacgagatgcagaagcggaaccggcagaccaacgagcggatcgaggaaatcatccggaccaccggcaaagagaacgccaagtacctgatcgagaagatcaagctgcacgacatgcaggaaggcaagtgcctgtacagcctggaagccatccctctggaagatctgctgaacaaccccttcaactatgaggtggaccacatcatccccagaagcgtgtccttcgacaacagcttcaacaacaaggtgctcgtgaagcaggaagaaaacagcaagaagggcaaccggaccccattccagtacctgagcagcagcgacagcaagatcagctacgaaaccttcaagaagcacatcctgaatctggccaagggcaagggcagaatcagcaagaccaagaaagagtatctgctggaagaacgggacatcaacaggttctccgtgcagaaagacttcatcaaccggaacctggtggataccagatacgccaccagaggcctgatgaacctgctgcggagctacttcagagtgaacaacctggacgtgaaagtgaagtccatcaatggcggcttcaccagctttctgcggcggaagtggaagtttaagaaagagcggaacaaggggtacaagcaccacgccgaggacgccctgatcattgccaacgccgatttcatcttcaaagagtggaagaaactggacaaggccaaaaaagtgatggaaaaccagatgttcgaggaaaagcaggccgagagcatgcccgagatcgaaaccgagcaggagtacaaagagatcttcatcaccccccaccagatcaagcacattaaggacttcaaggactacaagtacagccaccgggtggacaagaagcctaatagagagctgattaacgacaccctgtactccacccggaaggacgacaagggcaacaccctgatcgtgaacaatctgaacggcctgtacgacaaggacaatgacaagctgaaaaagctgatcaacaagagccccgaaaagctgctgatgtaccaccacgacccccagacctaccagaaactgaagctgattatggaacagtacggcgacgagaagaatcccctgtacaagtactacgaggaaaccgggaactacctgaccaagtactccaaaaaggacaacggccccgtgatcaagaagattaagtattacggcaacaaactgaacgcccatctggacatcaccgacgactaccccaacagcagaaacaaggtcgtgaagctgtccctgaagccctacagattcgacgtgtacctggacaatggcgtgtacaagttcgtgaccgtgaagaatctggatgtgatcaaaaaagaaaactactacgaagtgaatagcaagtgctatgaggaagctaagaagctgaagaagatcagcaaccaggccgagtttatcgcctccttctacaacaacgatctgatcaagatcaacggcgagctgtatagagtgatcggcgtgaacaacgacctgctgaaccggatcgaagtgaacatgatcgacatcacctaccgcgagtacctggaaaacatgaacgacaagaggccccccaggatcattaagacaatcgcctccaagacccagagcattaagaagtacagcacagacattctgggcaacctgtatgaagtgaaatctaagaagcaccctcagatcatcaaaaagggcaaaaggccggcggccacgaaaaaggccggccaggcaaaaaagaaaaagggatcctacccatacgatgttccagattacgcttacccatacgatgttccagattacgcttacccatacgatgttccagattacgcttaa

SEQ ID NO: 8 - protein, 1114 aa, Staphylococcus aureus
MAPKKKRKVGIHGVPAAKRNYILGLDIGITSVGYGIIDYETRDVIDAGVRLFKEANVENNEGRRSKRGARRLKRRRRHRIQRVKKLLFDYNLLTDHSELSGINPYEARVKGLSQKLSEEEFSAALLHLAKRRGVHNVNEVEEDTGNELSTKEQISRNSKALEEKYVAELQLERLKKDGEVRGSINRFKTSDYVKEAKQLLKVQKAYHQLDQSFIDTYIDLLETRRTYYEGPGEGSPFGWKDIKEWYEMLMGHCTYFPEELRSVKYAYNADLYNALNDLNNLVITRDENEKLEYYEKFQIIENVFKQKKKPTLKQIAKEILVNEEDIKGYRVTSTGKPEFTNLKVYHDIKDITARKEIIENAELLDQIAKILTIYQSSEDIQEELTNLNSELTQEEIEQISNLKGYTGTHNLSLKAINLILDELWHTNDNQIAIFNRLKLVPKKVDLSQQKEIPTTLVDDFILSPVVKRSFIQSIKVINAIIKKYGLPNDIIIELAREKNSKDAQKMINEMQKRNRQTNERIEEIIRTTGKENAKYLIEKIKLHDMQEGKCLYSLEAIPLEDLLNNPFNYEVDHIIPRSVSFDNSFNNKVLVKQEENSKKGNRTPFQYLSSSDSKISYETFKKHILNLAKGKGRISKTKKEYLLEERDINRFSVQKDFINRNLVDTRYATRGLMNLLRSYFRVNNLDVKVKSINGGFTSFLRRKWKFKKERNKGYKHHAEDALIIANADFIFKEWKKLDKAKKVMENQMFEEKQAESMPEIETEQEYKEIFITPHQIKHIKDFKDYKYSHRVDKKPNRELINDTLYSTRKDDKGNTLIVNNLNGLYDKDNDKLKKLINKSPEKLLMYHHDPQTYQKLKLIMEQYGDEKNPLYKYYEETGNYLTKYSKKDNGPVIKKIKYYGNKLNAHLDITDDYPNSRNKVVKLSLKPYRFDVYLDNGVYKFVTVKNLDVIKKENYYEVNSKCYEEAKKLKKISNQAEFIASFYNNDLIKINGELYRVIGVNNDLLNRIEVNMIDITYREYLENMNDKRPPRIIKTIASKTQSIKKYSTDILGNLYEVKSKKHPQIIKKGKRPAATKKAGQAKKKKGSYPYDVPDYAYPYDVPDYAYPYDVPDYA

SEQ ID NO: 9 - DNA, 23 bp, Artificial Sequence
  Description of Artificial Sequence: Synthetic oligonucleotide
cccgaatccatgtaaggatctag

SEQ ID NO: 10 - DNA, 26 bp, Artificial Sequence
  Description of Artificial Sequence: Synthetic oligonucleotide
atcccacagggctgtattactggggc

SEQ ID NO: 11 - DNA, 23 bp, Artificial Sequence
  Description of Artificial Sequence: Synthetic oligonucleotide
ccacagggctgtattactggggc

SEQ ID NO: 12 - DNA, 23 bp, Artificial Sequence
  Description of Artificial Sequence: Synthetic oligonucleotide
cccagggctgtattactggggct

SEQ ID NO: 13 - DNA, 23 bp, Artificial Sequence
  Description of Artificial Sequence: Synthetic oligonucleotide
aggattcatatagaagaaaggaa

SEQ ID NO: 14 - DNA, 23 bp, Artificial Sequence
  Description of Artificial Sequence: Synthetic oligonucleotide
cctttgcatggtggtcggctttc

SEQ ID NO: 15 - DNA, 23 bp, Artificial Sequence
  Description of Artificial Sequence: Synthetic oligonucleotide
cggtcctgtaggggaacatagag

SEQ ID NO: 16 - DNA, 26 bp, Artificial Sequence
  Description of Artificial Sequence: Synthetic oligonucleotide
gcgggtctcctgtaggggaacataga

SEQ ID NO: 17 - DNA, 23 bp, Artificial Sequence
  Description of Artificial Sequence: Synthetic oligonucleotide
agggtgtgtggctgcagcagcac

SEQ ID NO: 18 - DNA, 23 bp, Artificial Sequence
  Description of Artificial Sequence: Synthetic oligonucleotide
gggtgtgtggctgcagcagcaca

SEQ ID NO: 19 - DNA, 26 bp, Artificial Sequence
  Description of Artificial Sequence: Synthetic oligonucleotide
cagggtggtgtgtggctgcagcagca

SEQ ID NO: 20 - DNA, 23 bp, Artificial Sequence
  Description of Artificial Sequence: Synthetic oligonucleotide
cctggagaggagcttagacagcg

SEQ ID NO: 21 - DNA, 23 bp, Artificial Sequence
  Description of Artificial Sequence: Synthetic oligonucleotide
cgggtaatagcaaaggctcaggg

SEQ ID NO: 22 - DNA, 26 bp, Artificial Sequence
  Description of Artificial Sequence: Synthetic oligonucleotide
actctgatccgcccaccttgtcctcc

SEQ ID NO: 23 - DNA, 23 bp, Artificial Sequence
  Description of Artificial Sequence: Synthetic oligonucleotide
tggcatcgttgcggggctgtctg

SEQ ID NO: 24 - DNA, 26 bp, Artificial Sequence
  Description of Artificial Sequence: Synthetic oligonucleotide
actctcccagtcaggaggagagggag

SEQ ID NO: 25 - DNA, 23 bp, Artificial Sequence
  Description of Artificial Sequence: Synthetic oligonucleotide
gggcaaatcaggaggcccctcgt

SEQ ID NO: 26 - DNA, 26 bp, Artificial Sequence
  Description of Artificial Sequence: Synthetic oligonucleotide
ttgaattgcagcctgtgttgggagga

SEQ ID NO: 27 - DNA, 23 bp, Artificial Sequence
  Description of Artificial Sequence: Synthetic oligonucleotide
cggaatctccctggctgcacctg

SEQ ID NO: 28 - DNA, 23 bp, Artificial Sequence
  Description of Artificial Sequence: Synthetic oligonucleotide
ccatgcatatcttcctatgctcc

SEQ ID NO: 29 - DNA, 23 bp, Artificial Sequence
  Description of Artificial Sequence: Synthetic oligonucleotide
cccgagactgagactgaagacag

SEQ ID NO: 30 - DNA, 23 bp, Artificial Sequence
  Description of Artificial Sequence: Synthetic oligonucleotide
cggtgcctgtaatcacagctact

SEQ ID NO: 31 - DNA, 23 bp, Artificial Sequence
  Description of Artificial Sequence: Synthetic oligonucleotide
ccatctctccaccaactgccaca

SEQ ID NO: 32 - DNA, 20 bp, Artificial Sequence
  Description of Artificial Sequence: Synthetic oligonucleotide
ggatctataccatgtgggct

SEQ ID NO: 33 - DNA, 20 bp, Artificial Sequence
  Description of Artificial Sequence: Synthetic oligonucleotide
tagcagtgccaagtaactga

SEQ ID NO: 34 - DNA, 20 bp, Artificial Sequence
  Description of Artificial Sequence: Synthetic oligonucleotide
agggctgtattactggggct

SEQ ID NO: 35 - DNA, 20 bp, Artificial Sequence
  Description of Artificial Sequence: Synthetic oligonucleotide
gtgtgtggctgcagcagcac

SEQ ID NO: 36 - DNA, 20 bp, Artificial Sequence
  Description of Artificial Sequence: Synthetic oligonucleotide
ggagaggagcttagacagcg

SEQ ID NO: 37 - DNA, 20 bp, Artificial Sequence
  Description of Artificial Sequence: Synthetic oligonucleotide
caaatcaggaggcccctcgt

SEQ ID NO: 38 - DNA, 20 bp, Artificial Sequence
  Description of Artificial Sequence: Synthetic oligonucleotide
aatctccctggctgcacctg

SEQ ID NO: 39 - DNA, 20 bp, Artificial Sequence
  Description of Artificial Sequence: Synthetic oligonucleotide
gagactgagactgaagacag

SEQ ID NO: 40 - DNA, 20 bp, Artificial Sequence
  Description of Artificial Sequence: Synthetic oligonucleotide
tgcctgtaatcacagctact

SEQ ID NO: 41 - DNA, 20 bp, Artificial Sequence
  Description of Artificial Sequence: Synthetic oligonucleotide
catcgcctccccaagtgatg

SEQ ID NO: 42 - DNA, 20 bp, Artificial Sequence
  Description of Artificial Sequence: Synthetic oligonucleotide
aactgagaaaggtcacccct

SEQ ID NO: 43 - DNA, 20 bp, Artificial Sequence
  Description of Artificial Sequence: Synthetic oligonucleotide
cccgtgacatgtggggatta

SEQ ID NO: 44 - DNA, 64 bp, Artificial Sequence
  Description of Artificial Sequence: Synthetic oligonucleotide
aaagtctgagtcctctcctgtctcaaagggcatagctgtttgcatttggttccaggcctgttga

SEQ ID NO: 45 - DNA, 25 bp, Artificial Sequence
  Description of Artificial Sequence: Synthetic oligonucleotide
ttcatatagaagaaaggaaagggaa

SEQ ID NO: 46 - DNA, 25 bp, Artificial Sequence
  Description of Artificial Sequence: Synthetic oligonucleotide
catatagaaggaaggaaagggaagg

SEQ ID NO: 47 - DNA, 26 bp, Artificial Sequence
  Description of Artificial Sequence: Synthetic oligonucleotide
catatagaagaaaaaagggaaggact

SEQ ID NO: 48 - DNA, 23 bp, Artificial Sequence
  Description of Artificial Sequence: Synthetic oligonucleotide
cagcccctggccaggcggctcgg

SEQ ID NO: 49 - DNA, 23 bp, Artificial Sequence
  Description of Artificial Sequence: Synthetic oligonucleotide
ttccgcagcccctggccaggcgg

SEQ ID NO: 50 - DNA, 23 bp, Artificial Sequence
  Description of Artificial Sequence: Synthetic oligonucleotide
taagccgagccgcctggccaggg

SEQ ID NO: 51 - DNA, 23 bp, Artificial Sequence
  Description of Artificial Sequence: Synthetic oligonucleotide
aagccgagccgcctggccagggg

SEQ ID NO: 52 - DNA, 23 bp, Artificial Sequence
  Description of Artificial Sequence: Synthetic oligonucleotide
accttccgcagcccctggccagg

SEQ ID NO: 53 - DNA, 23 bp, Artificial Sequence
  Description of Artificial Sequence: Synthetic oligonucleotide
acctgaccttccgcagcccctgg

SEQ ID NO: 54 - DNA, 23 bp, Artificial Sequence
  Description of Artificial Sequence: Synthetic oligonucleotide
agccgcctggccaggggctgcgg

SEQ ID NO: 55 - DNA, 23 bp, Artificial Sequence
  Description of Artificial Sequence: Synthetic oligonucleotide
gcctggccaggggctgcggaagg

SEQ ID NO: 56 - DNA, 23 bp, Artificial Sequence
  Description of Artificial Sequence: Synthetic oligonucleotide
gccaggggctgcggaaggtcagg

SEQ ID NO: 57 - DNA, 23 bp, Artificial Sequence
  Description of Artificial Sequence: Synthetic oligonucleotide
gctgcggaaggtcaggtagtcgg

SEQ ID NO: 58 - DNA, 23 bp, Artificial Sequence
  Description of Artificial Sequence: Synthetic oligonucleotide
ctgcggaaggtcaggtagtcggg

SEQ ID NO: 59 - DNA, 23 bp, Artificial Sequence
  Description of Artificial Sequence: Synthetic oligonucleotide
tgcggaaggtcaggtagtcgggg

SEQ ID NO: 60 - DNA, 23 bp, Artificial Sequence
  Description of Artificial Sequence: Synthetic oligonucleotide
aaggtcaggtagtcggggctcgg

SEQ ID NO: 61 - DNA, 23 bp, Artificial Sequence
  Description of Artificial Sequence: Synthetic oligonucleotide
gggctcggagcgcaagccgctgg

SEQ ID NO: 62 - DNA, 23 bp, Artificial Sequence
  Description of Artificial Sequence: Synthetic oligonucleotide
ggctcggagcgcaagccgctggg

SEQ ID NO: 63 - DNA, 23 bp, Artificial Sequence
  Description of Artificial Sequence: Synthetic oligonucleotide
gctcggagcgcaagccgctgggg

SEQ ID NO: 64 - DNA, 23 bp, Artificial Sequence
  Description of Artificial Sequence: Synthetic oligonucleotide
ctcggagcgcaagccgctggggg

SEQ ID NO: 65 - DNA, 23 bp, Artificial Sequence
  Description of Artificial Sequence: Synthetic oligonucleotide
gcccagttcaatgcccccagcgg

SEQ ID NO: 66 - DNA, 23 bp, Artificial Sequence
  Description of Artificial Sequence: Synthetic oligonucleotide
agccgctgggggcattgaactgg

SEQ ID NO: 67 - DNA, 23 bp, Artificial Sequence
  Description of Artificial Sequence: Synthetic oligonucleotide
gccgctgggggcattgaactggg

SEQ ID NO: 68 - DNA, 23 bp, Artificial Sequence
  Description of Artificial Sequence: Synthetic oligonucleotide
ctgggggcattgaactgggctgg

SEQ ID NO: 69 - DNA, 23 bp, Artificial Sequence
  Description of Artificial Sequence: Synthetic oligonucleotide
tgggggcattgaactgggctggg

SEQ ID NO: 70 - DNA, 23 bp, Artificial Sequence
  Description of Artificial Sequence: Synthetic oligonucleotide
gggggcattgaactgggctgggg

SEQ ID NO: 71 - DNA, 23 bp, Artificial Sequence
  Description of Artificial Sequence: Synthetic oligonucleotide
ggggcattgaactgggctggggg

SEQ ID NO: 72 - DNA, 23 bp, Artificial Sequence
  Description of Artificial Sequence: Synthetic oligonucleotide
ttgaactgggctgggggcgcagg

SEQ ID NO: 73 - DNA, 23 bp, Artificial Sequence
  Description of Artificial Sequence: Synthetic oligonucleotide
tgaactgggctgggggcgcaggg

SEQ ID NO: 74 - DNA, 23 bp, Artificial Sequence
  Description of Artificial Sequence: Synthetic oligonucleotide
gaactgggctgggggcgcagggg

SEQ ID NO: 75 - DNA, 23 bp, Artificial Sequence
  Description of Artificial Sequence: Synthetic oligonucleotide
tgctgcaaggtttttagttcggg

SEQ ID NO: 76 - DNA, 23 bp, Artificial Sequence
  Description of Artificial Sequence: Synthetic oligonucleotide
atgctgcaaggtttttagttcgg

SEQ ID NO: 77 - DNA, 23 bp, Artificial Sequence
  Description of Artificial Sequence: Synthetic oligonucleotide
tccgagcgctccatgctgcaagg

SEQ ID NO: 78 - DNA, 23 bp, Artificial Sequence
  Description of Artificial Sequence: Synthetic oligonucleotide
gaactaaaaaccttgcagcatgg

SEQ ID NO: 79 - DNA, 23 bp, Artificial Sequence
  Description of Artificial Sequence: Synthetic oligonucleotide
accttgcagcatggagcgctcgg

SEQ ID NO: 80 - DNA, 23 bp, Artificial Sequence
  Description of Artificial Sequence: Synthetic oligonucleotide
ccttccaccgcgtgcagggctgg

SEQ ID NO: 81 - DNA, 23 bp, Artificial Sequence
  Description of Artificial Sequence: Synthetic oligonucleotide
tcggacaccagccctgcacgcgg

SEQ ID NO: 82 - DNA, 23 bp, Artificial Sequence
  Description of Artificial Sequence: Synthetic oligonucleotide
ctctccttccaccgcgtgcaggg

SEQ ID NO: 83 - DNA, 23 bp, Artificial Sequence
  Description of Artificial Sequence: Synthetic oligonucleotide
tctctccttccaccgcgtgcagg

SEQ ID NO: 84 - DNA, 23 bp, Artificial Sequence
  Description of Artificial Sequence: Synthetic oligonucleotide
gacaccagccctgcacgcggtgg

SEQ ID NO: 85 - DNA, 23 bp, Artificial Sequence
  Description of Artificial Sequence: Synthetic oligonucleotide
ccagccctgcacgcggtggaagg

SEQ ID NO: 86 - DNA, 23 bp, Artificial Sequence
  Description of Artificial Sequence: Synthetic oligonucleotide
tgcacgcggtggaaggagagagg

SEQ ID NO: 87 - DNA, 23 bp, Artificial Sequence
  Description of Artificial Sequence: Synthetic oligonucleotide
gcacgcggtggaaggagagaggg

SEQ ID NO: 88 - DNA, 23 bp, Artificial Sequence
  Description of Artificial Sequence: Synthetic oligonucleotide
cgcggtggaaggagagagggagg

SEQ ID NO: 89 - DNA, 23 bp, Artificial Sequence
  Description of Artificial Sequence: Synthetic oligonucleotide
gcggtggaaggagagagggaggg

SEQ ID NO: 90 - DNA, 23 bp, Artificial Sequence
  Description of Artificial Sequence: Synthetic oligonucleotide
gtggaaggagagagggagggagg

SEQ ID NO: 91 - DNA, 23 bp, Artificial Sequence
  Description of Artificial Sequence: Synthetic oligonucleotide
gaaggagagagggagggaggtgg

SEQ ID NO: 92 - DNA, 23 bp, Artificial Sequence
  Description of Artificial Sequence: Synthetic oligonucleotide
ggagagagggagggaggtggagg

SEQ ID NO: 93 - DNA, 23 bp, Artificial Sequence
  Description of Artificial Sequence: Synthetic oligonucleotide
gggagggaggtggaggaccatgg

SEQ ID NO: 94 - DNA, 23 bp, Artificial Sequence
  Description of Artificial Sequence: Synthetic oligonucleotide
agggaggtggaggaccatggagg

SEQ ID NO: 95 - DNA, 23 bp, Artificial Sequence
  Description of Artificial Sequence: Synthetic oligonucleotide
gggaggtggaggaccatggaggg

SEQ ID NO: 96 - DNA, 23 bp, Artificial Sequence
  Description of Artificial Sequence: Synthetic oligonucleotide
ggcctcccgctttccctccatgg

SEQ ID NO: 97 - DNA, 23 bp, Artificial Sequence
  Description of Artificial Sequence: Synthetic oligonucleotide
ggaggaccatggagggaaagcgg

SEQ ID NO: 98 - DNA, 23 bp, Artificial Sequence
  Description of Artificial Sequence: Synthetic oligonucleotide
gaggaccatggagggaaagcggg

SEQ ID NO: 99 - DNA, 23 bp, Artificial Sequence
  Description of Artificial Sequence: Synthetic oligonucleotide
gaccatggagggaaagcgggagg

SEQ ID NO: 100 - DNA, 23 bp, Artificial Sequence
  Description of Artificial Sequence: Synthetic oligonucleotide
cactcccttctacaaagcggcgg

SEQ ID NO: 101 - DNA, 23 bp, Artificial Sequence
  Description of Artificial Sequence: Synthetic oligonucleotide
ccccactcccttctacaaagcgg

SEQ ID NO: 102 - DNA, 23 bp, Artificial Sequence
  Description of Artificial Sequence: Synthetic oligonucleotide
ggaggccgccgctttgtagaagg

SEQ ID NO: 103 - DNA, 23 bp, Artificial Sequence
  Description of Artificial Sequence: Synthetic oligonucleotide
gaggccgccgctttgtagaaggg

SEQ ID NO: 104 - DNA, 23 bp, Artificial Sequence
  Description of Artificial Sequence: Synthetic oligonucleotide
cgccgctttgtagaagggagtgg

SEQ ID NO: 105 - DNA, 23 bp, Artificial Sequence
  Description of Artificial Sequence: Synthetic oligonucleotide
gccgctttgtagaagggagtggg

SEQ ID NO: 106 - DNA, 23 bp, Artificial Sequence
  Description of Artificial Sequence: Synthetic oligonucleotide
ccgctttgtagaagggagtgggg

SEQ ID NO: 107 - DNA, 23 bp, Artificial Sequence
  Description of Artificial Sequence: Synthetic oligonucleotide
tgtagaagggagtggggaagtgg

SEQ ID NO: 108 - DNA, 23 bp, Artificial Sequence
  Description of Artificial Sequence: Synthetic oligonucleotide
tggcctgcgtcgaaagtctctgg

SEQ ID NO: 109 - DNA, 23 bp, Artificial Sequence
  Description of Artificial Sequence: Synthetic oligonucleotide
ggaccagagactttcgacgcagg

SEQ ID NO: 110 - DNA, 23 bp, Artificial Sequence
  Description of Artificial Sequence: Synthetic oligonucleotide
cgctgtccgtctcaggctcttgg

SEQ ID NO: 111 - DNA, 23 bp, Artificial Sequence
  Description of Artificial Sequence: Synthetic oligonucleotide
cgcaggccaagagcctgagacgg

SEQ ID NO: 112 - DNA, 23 bp, Artificial Sequence
  Description of Artificial Sequence: Synthetic oligonucleotide
ctgaaagcgctgtccgtctcagg

SEQ ID NO: 113 - DNA, 23 bp, Artificial Sequence
  Description of Artificial Sequence: Synthetic oligonucleotide
ccctttctgcagtggctgggagg

SEQ ID NO: 114 - DNA, 23 bp, Artificial Sequence
  Description of Artificial Sequence: Synthetic oligonucleotide
tccccctttctgcagtggctggg

SEQ ID NO: 115 - DNA, 23 bp, Artificial Sequence
  Description of Artificial Sequence: Synthetic oligonucleotide
ttccccctttctgcagtggctgg

SEQ ID NO: 116 - DNA, 23 bp, Artificial Sequence
  Description of Artificial Sequence: Synthetic oligonucleotide
ccatttccccctttctgcagtgg

SEQ ID NO: 117 - DNA, 23 bp, Artificial Sequence
  Description of Artificial Sequence: Synthetic oligonucleotide
tcctcccagccactgcagaaagg

SEQ ID NO: 118 - DNA, 23 bp, Artificial Sequence
  Description of Artificial Sequence: Synthetic oligonucleotide
cctcccagccactgcagaaaggg

SEQ ID NO: 119 - DNA, 23 bp, Artificial Sequence
  Description of Artificial Sequence: Synthetic oligonucleotide
ctcccagccactgcagaaagggg

SEQ ID NO: 120 - DNA, 23 bp, Artificial Sequence
  Description of Artificial Sequence: Synthetic oligonucleotide
tcccagccactgcagaaaggggg

SEQ ID NO: 121 - DNA, 23 bp, Artificial Sequence
  Description of Artificial Sequence: Synthetic oligonucleotide
ccactgcagaaagggggaaatgg

SEQ ID NO: 122 - DNA, 23 bp, Artificial Sequence
  Description of Artificial Sequence: Synthetic oligonucleotide
agggggaaatggcaactctttgg

SEQ ID NO: 123 - DNA, 23 bp, Artificial Sequence
  Description of Artificial Sequence: Synthetic oligonucleotide
gcaccctcccacggtgattatgg

SEQ ID NO: 124 - DNA, 23 bp, Artificial Sequence
  Description of Artificial Sequence: Synthetic oligonucleotide
ctctttggccataatcaccgtgg

SEQ ID NO: 125 - DNA, 23 bp, Artificial Sequence
  Description of Artificial Sequence: Synthetic oligonucleotide
tctttggccataatcaccgtggg

SEQ ID NO: 126 - DNA, 23 bp, Artificial Sequence
  Description of Artificial Sequence: Synthetic oligonucleotide
ttggccataatcaccgtgggagg

SEQ ID NO: 127 - DNA, 23 bp, Artificial Sequence
  Description of Artificial Sequence: Synthetic oligonucleotide
tggccataatcaccgtgggaggg

SEQ ID NO: 128 - DNA, 23 bp, Artificial Sequence
  Description of Artificial Sequence: Synthetic oligonucleotide
ttgcccttggcaccctcccacgg

SEQ ID NO: 129 - DNA, 23 bp, Artificial Sequence
  Description of Artificial Sequence: Synthetic oligonucleotide
atcaccgtgggagggtgccaagg

SEQ ID NO: 130 - DNA, 23 bp, Artificial Sequence
  Description of Artificial Sequence: Synthetic oligonucleotide
tcaccgtgggagggtgccaaggg

SEQ ID NO: 131 - DNA, 23 bp, Artificial Sequence
  Description of Artificial Sequence: Synthetic oligonucleotide
tgctgggtgggctttgcccttgg

SEQ ID NO: 132 - DNA, 23 bp, Artificial Sequence
  Description of Artificial Sequence: Synthetic oligonucleotide
gaataggtgtactgctgggtggg

SEQ ID NO: 133 - DNA, 23 bp, Artificial Sequence
  Description of Artificial Sequence: Synthetic oligonucleotide
ggaataggtgtactgctgggtgg

SEQ ID NO: 134 - DNA, 23 bp, Artificial Sequence
  Description of Artificial Sequence: Synthetic oligonucleotide
gttggaataggtgtactgctggg

SEQ ID NO: 135 - DNA, 23 bp, Artificial Sequence
  Description of Artificial Sequence: Synthetic oligonucleotide
ggttggaataggtgtactgctgg

SEQ ID NO: 136 - DNA, 23 bp, Artificial Sequence
  Description of Artificial Sequence: Synthetic oligonucleotide
gggcctggctgggttggaatagg

SEQ ID NO: 137 - DNA, 23 bp, Artificial Sequence
  Description of Artificial Sequence: Synthetic oligonucleotide
ggccgggggcctggctgggttgg

SEQ ID NO: 138 - DNA, 23 bp, Artificial Sequence
  Description of Artificial Sequence: Synthetic oligonucleotide
acacctattccaacccagccagg

SEQ ID NO: 139 - DNA, 23 bp, Artificial Sequence
  Description of Artificial Sequence: Synthetic oligonucleotide
cgctggccgggggcctggctggg

SEQ ID NO: 140 - DNA, 23 bp, Artificial Sequence
  Description of Artificial Sequence: Synthetic oligonucleotide
tcgctggccgggggcctggctgg

SEQ ID NO: 141 - DNA, 23 bp, Artificial Sequence
  Description of Artificial Sequence: Synthetic oligonucleotide
ttccaacccagccaggcccccgg

SEQ ID NO: 142 - DNA, 23 bp, Artificial Sequence
  Description of Artificial Sequence: Synthetic oligonucleotide
ggagtcgctggccgggggcctgg

SEQ ID NO: 143 - DNA, 23 bp, Artificial Sequence
  Description of Artificial Sequence: Synthetic oligonucleotide
tgtctggagtcgctggccggggg

SEQ ID NO: 144 - DNA, 23 bp, Artificial Sequence
  Description of Artificial Sequence: Synthetic oligonucleotide
ttgtctggagtcgctggccgggg

SEQ ID NO: 145 - DNA, 23 bp, Artificial Sequence
  Description of Artificial Sequence: Synthetic oligonucleotide
cttgtctggagtcgctggccggg

SEQ ID NO: 146 - DNA, 23 bp, Artificial Sequence
  Description of Artificial Sequence: Synthetic oligonucleotide
tcttgtctggagtcgctggccgg

SEQ ID NO: 147 - DNA, 23 bp, Artificial Sequence
  Description of Artificial Sequence: Synthetic oligonucleotide
aggttcttgtctggagtcgctgg

SEQ ID NO: 148 - DNA, 23 bp, Artificial Sequence
  Description of Artificial Sequence: Synthetic oligonucleotide
gtgtggcccaggttcttgtctgg

SEQ ID NO: 149 - DNA, 23 bp, Artificial Sequence
  Description of Artificial Sequence: Synthetic oligonucleotide
agcgactccagacaagaacctgg

SEQ ID NO: 150 - DNA, 23 bp, Artificial Sequence
  Description of Artificial Sequence: Synthetic oligonucleotide
gcgactccagacaagaacctggg

SEQ ID NO: 151 - DNA, 23 bp, Artificial Sequence
  Description of Artificial Sequence: Synthetic oligonucleotide
gctgccaccgtgtgtggcccagg

SEQ ID NO: 152 - DNA, 23 bp, Artificial Sequence
  Description of Artificial Sequence: Synthetic oligonucleotide
acaagaacctgggccacacacgg

SEQ ID NO: 153 - DNA, 23 bp, Artificial Sequence
  Description of Artificial Sequence: Synthetic oligonucleotide
ttagatgctgccaccgtgtgtgg

SEQ ID NO: 154 - DNA, 23 bp, Artificial Sequence
  Description of Artificial Sequence: Synthetic oligonucleotide
agaacctgggccacacacggtgg

SEQ ID NO: 155 - DNA, 23 bp, Artificial Sequence
  Description of Artificial Sequence: Synthetic oligonucleotide
acacacggtggcagcatctaagg

SEQ ID NO: 156 - DNA, 23 bp, Artificial Sequence
  Description of Artificial Sequence: Synthetic oligonucleotide
ggcagcatctaaggtgccccagg

SEQ ID NO: 157 - DNA, 23 bp, Artificial Sequence
  Description of Artificial Sequence: Synthetic oligonucleotide
gccaggagcacaggagcctgggg

SEQ ID NO: 158 - DNA, 23 bp, Artificial Sequence
  Description of Artificial Sequence: Synthetic oligonucleotide
ggccaggagcacaggagcctggg

SEQ ID NO: 159 - DNA, 23 bp, Artificial Sequence
  Description of Artificial Sequence: Synthetic oligonucleotide
tggccaggagcacaggagcctgg

SEQ ID NO: 160 - DNA, 23 bp, Artificial Sequence
  Description of Artificial Sequence: Synthetic oligonucleotide
cagggcctggccaggagcacagg

SEQ ID NO: 161 - DNA, 23 bp, Artificial Sequence
  Description of Artificial Sequence: Synthetic oligonucleotide
gccccaggctcctgtgctcctgg

SEQ ID NO: 162 - DNA, 23 bp, Artificial Sequence
  Description of Artificial Sequence: Synthetic oligonucleotide
aggctcctgtgctcctggccagg

SEQ ID NO: 163 - DNA, 23 bp, Artificial Sequence
  Description of Artificial Sequence: Synthetic oligonucleotide
tctgagtgcagggcctggccagg

SEQ ID NO: 164 - DNA, 23 bp, Artificial Sequence
  Description of Artificial Sequence: Synthetic oligonucleotide
cagtgtctgagtgcagggcctgg

SEQ ID NO: 165 - DNA, 23 bp, Artificial Sequence
  Description of Artificial Sequence: Synthetic oligonucleotide
gccagcagtgtctgagtgcaggg

SEQ ID NO: 166 - DNA, 23 bp, Artificial Sequence
  Description of Artificial Sequence: Synthetic oligonucleotide
tgccagcagtgtctgagtgcagg

SEQ ID NO: 167 - DNA, 23 bp, Artificial Sequence
  Description of Artificial Sequence: Synthetic oligonucleotide
gccctgcactcagacactgctgg

SEQ ID NO: 168 - DNA, 23 bp, Artificial Sequence
  Description of Artificial Sequence: Synthetic oligonucleotide
tgtacccagagagcagtgtcggg

SEQ ID NO: 169 - DNA, 23 bp, Artificial Sequence
  Description of Artificial Sequence: Synthetic oligonucleotide
ctgtacccagagagcagtgtcgg

SEQ ID NO: 170 - DNA, 23 bp, Artificial Sequence
  Description of Artificial Sequence: Synthetic oligonucleotide
tggcacccgacactgctctctgg

SEQ ID NO: 171 - DNA, 23 bp, Artificial Sequence
  Description of Artificial Sequence: Synthetic oligonucleotide
ggcacccgacactgctctctggg

SEQ ID NO: 172 - DNA, 23 bp, Artificial Sequence
  Description of Artificial Sequence: Synthetic oligonucleotide
actgctctctgggtacagcaagg

SEQ ID NO: 173 - DNA, 23 bp, Artificial Sequence
  Description of Artificial Sequence: Synthetic oligonucleotide
ctgctctctgggtacagcaaggg

SEQ ID NO: 174 - DNA, 23 bp, Artificial Sequence
  Description of Artificial Sequence: Synthetic oligonucleotide
tgggtacagcaagggcaatgtgg

SEQ ID NO: 175 - DNA, 23 bp, Artificial Sequence
  Description of Artificial Sequence: Synthetic oligonucleotide
tctcctgctcttcatcgggcagg

SEQ ID NO: 176 - DNA, 23 bp, Artificial Sequence
  Description of Artificial Sequence: Synthetic oligonucleotide
gcattctcctgctcttcatcggg

SEQ ID NO: 177 - DNA, 23 bp, Artificial Sequence
  Description of Artificial Sequence: Synthetic oligonucleotide
tgcattctcctgctcttcatcgg

SEQ ID NO: 178 - DNA, 23 bp, Artificial Sequence
  Description of Artificial Sequence: Synthetic oligonucleotide
tgtcctgcccgatgaagagcagg

SEQ ID NO: 179 - DNA, 23 bp, Artificial Sequence
  Description of Artificial Sequence: Synthetic oligonucleotide
tgaagagcaggagaatgcactgg

SEQ ID NO: 180 - DNA, 23 bp, Artificial Sequence
  Description of Artificial Sequence: Synthetic oligonucleotide
gaagagcaggagaatgcactggg

SEQ ID NO: 181 - DNA, 23 bp, Artificial Sequence
  Description of Artificial Sequence: Synthetic oligonucleotide
catttgaacagtgtgtgtgaggg

SEQ ID NO: 182 - DNA, 23 bp, Artificial Sequence
  Description of Artificial Sequence: Synthetic oligonucleotide
ccatttgaacagtgtgtgtgagg

SEQ ID NO: 183 - DNA, 23 bp, Artificial Sequence
  Description of Artificial Sequence: Synthetic oligonucleotide
cctcacacacactgttcaaatgg

SEQ ID NO: 184 - DNA, 23 bp, Artificial Sequence
  Description of Artificial Sequence: Synthetic oligonucleotide
ctcacacacactgttcaaatggg

SEQ ID NO: 185 - DNA, 23 bp, Artificial Sequence
  Description of Artificial Sequence: Synthetic oligonucleotide
tcacacacactgttcaaatgggg

SEQ ID NO: 186 - DNA, 23 bp, Artificial Sequence
  Description of Artificial Sequence: Synthetic oligonucleotide
tggggaaactgagtcctgagtgg

SEQ ID NO: 187 - DNA, 23 bp, Artificial Sequence
  Description of Artificial Sequence: Synthetic oligonucleotide
gtgggaaagtggaaccactcagg

SEQ ID NO: 188 - DNA, 23 bp, Artificial Sequence
  Description of Artificial Sequence: Synthetic oligonucleotide
acttcaggactgtgggaaagtgg

SEQ ID NO: 189 - DNA, 23 bp, Artificial Sequence
  Description of Artificial Sequence: Synthetic oligonucleotide
agtgcacacttcaggactgtggg

SEQ ID NO: 190 - DNA, 23 bp, Artificial Sequence
  Description of Artificial Sequence: Synthetic oligonucleotide
cagtgcacacttcaggactgtgg

SEQ ID NO: 191 - DNA, 23 bp, Artificial Sequence
  Description of Artificial Sequence: Synthetic oligonucleotide
ctggctccagtgcacacttcagg

SEQ ID NO: 192 - DNA, 23 bp, Artificial Sequence
  Description of Artificial Sequence: Synthetic oligonucleotide
cacagtcctgaagtgtgcactgg

SEQ ID NO: 193 - DNA, 23 bp, Artificial Sequence
  Description of Artificial Sequence: Synthetic oligonucleotide
ctgaagtgtgcactggagccagg

SEQ ID NO: 194 - DNA, 23 bp, Artificial Sequence
  Description of Artificial Sequence: Synthetic oligonucleotide
gtgtgcactggagccaggattgg

SEQ ID NO: 195 - DNA, 23 bp, Artificial Sequence
  Description of Artificial Sequence: Synthetic oligonucleotide
tttaagacagactccaatcctgg

SEQ ID NO: 196 - DNA, 23 bp, Artificial Sequence
  Description of Artificial Sequence: Synthetic oligonucleotide
gtctgtcttaaagtaatagctgg

SEQ ID NO: 197 - DNA, 23 bp, Artificial Sequence
  Description of Artificial Sequence: Synthetic oligonucleotide
tctgtcttaaagtaatagctggg

SEQ ID NO: 198 - DNA, 23 bp, Artificial Sequence
  Description of Artificial Sequence: Synthetic oligonucleotide
atagctgggtttgtaaatgtagg

SEQ ID NO: 199 - DNA, 23 bp, Artificial Sequence
  Description of Artificial Sequence: Synthetic oligonucleotide
atgtaggacactatcattgcagg

SEQ ID NO: 200 - DNA, 23 bp, Artificial Sequence
  Description of Artificial Sequence: Synthetic oligonucleotide
acacatcttcagggtctcaaagg

SEQ ID NO: 201 - DNA, 23 bp, Artificial Sequence
  Description of Artificial Sequence: Synthetic oligonucleotide
ctaaagccaacacatcttcaggg

SEQ ID NO: 202 - DNA, 23 bp, Artificial Sequence
  Description of Artificial Sequence: Synthetic oligonucleotide
cctaaagccaacacatcttcagg

SEQ ID NO: 203 - DNA, 23 bp, Artificial Sequence
  Description of Artificial Sequence: Synthetic oligonucleotide
ttgagaccctgaagatgtgttgg

SEQ ID NO: 204 - DNA, 23 bp, Artificial Sequence
  Description of Artificial Sequence: Synthetic oligonucleotide
cctgaagatgtgttggctttagg

SEQ ID NO: 205 - DNA, 23 bp, Artificial Sequence
  Description of Artificial Sequence: Synthetic oligonucleotide
aggagacaaactcaagcagaagg

SEQ ID NO: 206 - DNA, 23 bp, Artificial Sequence
  Description of Artificial Sequence: Synthetic oligonucleotide
acaaactcaagcagaaggtctgg

SEQ ID NO: 207 - DNA, 23 bp, Artificial Sequence
  Description of Artificial Sequence: Synthetic oligonucleotide
cagaaggtctggtctgatagtgg

SEQ ID NO: 208 - DNA, 23 bp, Artificial Sequence
  Description of Artificial Sequence: Synthetic oligonucleotide
ctctgcctgggtcagtattaggg

SEQ ID NO: 209 - DNA, 23 bp, Artificial Sequence
  Description of Artificial Sequence: Synthetic oligonucleotide
cctctgcctgggtcagtattagg

SEQ ID NO: 210 - DNA, 23 bp, Artificial Sequence
  Description of Artificial Sequence: Synthetic oligonucleotide
agtggccctaatactgacccagg

SEQ ID NO: 211 - DNA, 23 bp, Artificial Sequence
  Description of Artificial Sequence: Synthetic oligonucleotide
cctaatactgacccaggcagagg

SEQ ID NO: 212 - DNA, 23 bp, Artificial Sequence
  Description of Artificial Sequence: Synthetic oligonucleotide
aatgttgcctgcctctgcctggg

SEQ ID NO: 213 - DNA, 23 bp, Artificial Sequence
  Description of Artificial Sequence: Synthetic oligonucleotide
aaatgttgcctgcctctgcctgg

SEQ ID NO: 214 - DNA, 23 bp, Artificial Sequence
  Description of Artificial Sequence: Synthetic oligonucleotide
atactgacccaggcagaggcagg

SEQ ID NO: 215 - DNA, 23 bp, Artificial Sequence
  Description of Artificial Sequence: Synthetic oligonucleotide
caggtatggcctggtttttgagg

SEQ ID NO: 216 - DNA, 23 bp, Artificial Sequence
  Description of Artificial Sequence: Synthetic oligonucleotide
acatttctacctcaaaaaccagg

SEQ ID NO: 217 - DNA, 23 bp, Artificial Sequence
  Description of Artificial Sequence: Synthetic oligonucleotide
tttgtgacgcaggtatggcctgg

SEQ ID NO: 218 - DNA, 23 bp, Artificial Sequence
  Description of Artificial Sequence: Synthetic oligonucleotide
gggtatttgtgacgcaggtatgg

SEQ ID NO: 219 - DNA, 23 bp, Artificial Sequence
  Description of Artificial Sequence: Synthetic oligonucleotide
agcctgggtatttgtgacgcagg

SEQ ID NO: 220 - DNA, 23 bp, Artificial Sequence
  Description of Artificial Sequence: Synthetic oligonucleotide
tacctgcgtcacaaatacccagg

SEQ ID NO: 221 - DNA, 23 bp, Artificial Sequence
  Description of Artificial Sequence: Synthetic oligonucleotide
tggaagctgcagcaaagcctggg

SEQ ID NO: 222 - DNA, 23 bp, Artificial Sequence
  Description of Artificial Sequence: Synthetic oligonucleotide
ctggaagctgcagcaaagcctgg

SEQ ID NO: 223 - DNA, 23 bp, Artificial Sequence
  Description of Artificial Sequence: Synthetic oligonucleotide
gttggtgcaaccaggtaggctgg

SEQ ID NO: 224 - DNA, 23 bp, Artificial Sequence
  Description of Artificial Sequence: Synthetic oligonucleotide
gctgcagcttccagcctacctgg

SEQ ID NO: 225 - DNA, 23 bp, Artificial Sequence
  Description of Artificial Sequence: Synthetic oligonucleotide
agaagttggtgcaaccaggtagg

SEQ ID NO: 226 - DNA, 23 bp, Artificial Sequence
  Description of Artificial Sequence: Synthetic oligonucleotide
aaaaagaagttggtgcaaccagg

SEQ ID NO: 227 - DNA, 23 bp, Artificial Sequence
  Description of Artificial Sequence: Synthetic oligonucleotide
cctagttatgaaaaagaagttgg

SEQ ID NO: 228 - DNA, 23 bp, Artificial Sequence
  Description of Artificial Sequence: Synthetic oligonucleotide
ccaacttctttttcataactagg

SEQ ID NO: 229 - DNA, 23 bp, Artificial Sequence
  Description of Artificial Sequence: Synthetic oligonucleotide
atcttgtagtgactcctcagagg

SEQ ID NO: 230 - DNA, 23 bp, Artificial Sequence
  Description of Artificial Sequence: Synthetic oligonucleotide
tggtatttaggcttcctctgagg

SEQ ID NO: 231 - DNA, 23 bp, Artificial Sequence
  Description of Artificial Sequence: Synthetic oligonucleotide
gccagaccccgatggtatttagg

SEQ ID NO: 232 - DNA, 23 bp, Artificial Sequence
  Description of Artificial Sequence: Synthetic oligonucleotide
agaggaagcctaaataccatcgg

SEQ ID NO: 233 - DNA, 23 bp, Artificial Sequence
  Description of Artificial Sequence: Synthetic oligonucleotide
gaggaagcctaaataccatcggg

SEQ ID NO: 234 - DNA, 23 bp, Artificial Sequence
  Description of Artificial Sequence: Synthetic oligonucleotide
aggaagcctaaataccatcgggg

SEQ ID NO: 235 - DNA, 23 bp, Artificial Sequence
  Description of Artificial Sequence: Synthetic oligonucleotide
gtgtgaacgccagaccccgatgg

SEQ ID NO: 236 - DNA, 23 bp, Artificial Sequence
  Description of Artificial Sequence: Synthetic oligonucleotide
gcctaaataccatcggggtctgg

SEQ ID NO: 237 - DNA, 23 bp, Artificial Sequence
  Description of Artificial Sequence: Synthetic oligonucleotide
gaggtttgggcattgcttgtggg

SEQ ID NO: 238 - DNA, 23 bp, Artificial Sequence
  Description of Artificial Sequence: Synthetic oligonucleotide
ggaggtttgggcattgcttgtgg

SEQ ID NO: 239 - DNA, 23 bp, Artificial Sequence
  Description of Artificial Sequence: Synthetic oligonucleotide
gcccagtctcttggaggtttggg

SEQ ID NO: 240 - DNA, 23 bp, Artificial Sequence
  Description of Artificial Sequence: Synthetic oligonucleotide
tgcccagtctcttggaggtttgg

SEQ ID NO: 241 - DNA, 23 bp, Artificial Sequence
  Description of Artificial Sequence: Synthetic oligonucleotide
agatctgcccagtctcttggagg

SEQ ID NO: 242 - DNA, 23 bp, Artificial Sequence
  Description of Artificial Sequence: Synthetic oligonucleotide
tgcccaaacctccaagagactgg

SEQ ID NO: 243 - DNA, 23 bp, Artificial Sequence
  Description of Artificial Sequence: Synthetic oligonucleotide
cacagatctgcccagtctcttgg

SEQ ID NO: 244 - DNA, 23 bp, Artificial Sequence
  Description of Artificial Sequence: Synthetic oligonucleotide
gcccaaacctccaagagactggg

SEQ ID NO: 245 - DNA, 23 bp, Artificial Sequence
  Description of Artificial Sequence: Synthetic oligonucleotide
ctcaaatcaaaactcattgttgg

SEQ ID NO: 246 - DNA, 23 bp, Artificial Sequence
  Description of Artificial Sequence: Synthetic oligonucleotide
tcaaatcaaaactcattgttggg

SEQ ID NO: 247 - DNA, 23 bp, Artificial Sequence
  Description of Artificial Sequence: Synthetic oligonucleotide
caaatcaaaactcattgttgggg

SEQ ID NO: 248 - DNA, 23 bp, Artificial Sequence
  Description of Artificial Sequence: Synthetic oligonucleotide
aaatcaaaactcattgttggggg

SEQ ID NO: 249 - DNA, 23 bp, Artificial Sequence
  Description of Artificial Sequence: Synthetic oligonucleotide
ggtgatagagttgacttcacagg

SEQ ID NO: 250 - DNA, 23 bp, Artificial Sequence
  Description of Artificial Sequence: Synthetic oligonucleotide
gcaaggagccaagactttcaggg

SEQ ID NO: 251 - DNA, 23 bp, Artificial Sequence
  Description of Artificial Sequence: Synthetic oligonucleotide
tgcaaggagccaagactttcagg

SEQ ID NO: 252 - DNA, 23 bp, Artificial Sequence
  Description of Artificial Sequence: Synthetic oligonucleotide
ttcacaggccctgaaagtcttgg

SEQ ID NO: 253 - DNA, 23 bp, Artificial Sequence
  Description of Artificial Sequence: Synthetic oligonucleotide
aagtcttggctccttgcactagg

SEQ ID NO: 254 - DNA, 23 bp, Artificial Sequence
  Description of Artificial Sequence: Synthetic oligonucleotide
cccagagcactcctagtgcaagg

SEQ ID NO: 255 - DNA, 23 bp, Artificial Sequence
  Description of Artificial Sequence: Synthetic oligonucleotide
tccttgcactaggagtgctctgg

SEQ ID NO: 256 - DNA, 23 bp, Artificial Sequence
  Description of Artificial Sequence: Synthetic oligonucleotide
ccttgcactaggagtgctctggg

SEQ ID NO: 257 - DNA, 23 bp, Artificial Sequence
  Description of Artificial Sequence: Synthetic oligonucleotide
cactaggagtgctctgggtacgg

SEQ ID NO: 258 - DNA, 23 bp, Artificial Sequence
  Description of Artificial Sequence: Synthetic oligonucleotide
actaggagtgctctgggtacggg

SEQ ID NO: 259 - DNA, 23 bp, Artificial Sequence
  Description of Artificial Sequence: Synthetic oligonucleotide
agtgctctgggtacgggtacagg

SEQ ID NO: 260 - DNA, 23 bp, Artificial Sequence
  Description of Artificial Sequence: Synthetic oligonucleotide
gggtacaggctgccccttgtagg

SEQ ID NO: 261 - DNA, 23 bp, Artificial Sequence
  Description of Artificial Sequence: Synthetic oligonucleotide
ggtacaggctgccccttgtaggg

SEQ ID NO: 262 - DNA, 23 bp, Artificial Sequence
  Description of Artificial Sequence: Synthetic oligonucleotide
gagcaactatgccctacaagggg

SEQ ID NO: 263 - DNA, 23 bp, Artificial Sequence
  Description of Artificial Sequence: Synthetic oligonucleotide
agagcaactatgccctacaaggg

SEQ ID NO: 264 - DNA, 23 bp, Artificial Sequence
  Description of Artificial Sequence: Synthetic oligonucleotide
aagagcaactatgccctacaagg

SEQ ID NO: 265 - DNA, 23 bp, Artificial Sequence
  Description of Artificial Sequence: Synthetic oligonucleotide
gaccataaagccacaagtagagg

SEQ ID NO: 266 - DNA, 23 bp, Artificial Sequence
  Description of Artificial Sequence: Synthetic oligonucleotide
gctcttgtttcctctacttgtgg

SEQ ID NO: 267 - DNA, 23 bp, Artificial Sequence
  Description of Artificial Sequence: Synthetic oligonucleotide
ttcctctacttgtggctttatgg

SEQ ID NO: 268 - DNA, 23 bp, Artificial Sequence
  Description of Artificial Sequence: Synthetic oligonucleotide
tacttgtggctttatggtctagg

SEQ ID NO: 269 - DNA, 23 bp, Artificial Sequence
  Description of Artificial Sequence: Synthetic oligonucleotide
ctttatggtctaggcctttcagg

SEQ ID NO: 270 - DNA, 23 bp, Artificial Sequence
  Description of Artificial Sequence: Synthetic oligonucleotide
cagagccccaaactcctgaaagg

SEQ ID NO: 271 - DNA, 23 bp, Artificial Sequence
  Description of Artificial Sequence: Synthetic oligonucleotide
gtctaggcctttcaggagtttgg

SEQ ID NO: 272 - DNA, 23 bp, Artificial Sequence
  Description of Artificial Sequence: Synthetic oligonucleotide
tctaggcctttcaggagtttggg

SEQ ID NO: 273 - DNA, 23 bp, Artificial Sequence
  Description of Artificial Sequence: Synthetic oligonucleotide
ctaggcctttcaggagtttgggg

SEQ ID NO: 274 - DNA, 23 bp, Artificial Sequence
  Description of Artificial Sequence: Synthetic oligonucleotide
ctttcaggagtttggggctctgg

SEQ ID NO: 275 - DNA, 23 bp, Artificial Sequence
  Description of Artificial Sequence: Synthetic oligonucleotide
tcaggagtttggggctctggcgg

SEQ ID NO: 276 - DNA, 23 bp, Artificial Sequence
  Description of Artificial Sequence: Synthetic oligonucleotide
agtttggggctctggcggagagg

SEQ ID NO: 277 - DNA, 23 bp, Artificial Sequence
  Description of Artificial Sequence: Synthetic oligonucleotide
gtttggggctctggcggagaggg

SEQ ID NO: 278 - DNA, 23 bp, Artificial Sequence
  Description of Artificial Sequence: Synthetic oligonucleotide
ctctggcggagagggcctgctgg

SEQ ID NO: 279 - DNA, 23 bp, Artificial Sequence
  Description of Artificial Sequence: Synthetic oligonucleotide
tctggcggagagggcctgctggg

SEQ ID NO: 280 - DNA, 23 bp, Artificial Sequence
  Description of Artificial Sequence: Synthetic oligonucleotide
tggccagatgtgctcccagcagg

SEQ ID NO: 281 - DNA, 23 bp, Artificial Sequence
  Description of Artificial Sequence: Synthetic oligonucleotide
gggcctgctgggagcacatctgg

SEQ ID NO: 282 - DNA, 23 bp, Artificial Sequence
  Description of Artificial Sequence: Synthetic oligonucleotide
tttgatttcactctgcagggtgg

SEQ ID NO: 283 - DNA, 23 bp, Artificial Sequence
  Description of Artificial Sequence: Synthetic oligonucleotide
tggtttgatttcactctgcaggg

SEQ ID NO: 284 - DNA, 23 bp, Artificial Sequence
  Description of Artificial Sequence: Synthetic oligonucleotide
ctggtttgatttcactctgcagg

SEQ ID NO: 285 - DNA, 23 bp, Artificial Sequence
  Description of Artificial Sequence: Synthetic oligonucleotide
ctgcagagtgaaatcaaaccagg

SEQ ID NO: 286 - DNA, 23 bp, Artificial Sequence
  Description of Artificial Sequence: Synthetic oligonucleotide
gagtgaaatcaaaccaggcctgg

SEQ ID NO: 287 - DNA, 23 bp, Artificial Sequence
  Description of Artificial Sequence: Synthetic oligonucleotide
gttgaggttgcagccaggcctgg

SEQ ID NO: 288 - DNA, 23 bp, Artificial Sequence
  Description of Artificial Sequence: Synthetic oligonucleotide
agggtgttgaggttgcagccagg

SEQ ID NO: 289 - DNA, 23 bp, Artificial Sequence
  Description of Artificial Sequence: Synthetic oligonucleotide
ctctttccaggagggtgttgagg

SEQ ID NO: 290 - DNA, 23 bp, Artificial Sequence
  Description of Artificial Sequence: Synthetic oligonucleotide
ctgcaacctcaacaccctcctgg

SEQ ID NO: 291 - DNA, 23 bp, Artificial Sequence
  Description of Artificial Sequence: Synthetic oligonucleotide
gtattctcctctttccaggaggg

SEQ ID NO: 292 - DNA, 23 bp, Artificial Sequence
  Description of Artificial Sequence: Synthetic oligonucleotide
agtattctcctctttccaggagg

SEQ ID NO: 293 - DNA, 23 bp, Artificial Sequence
  Description of Artificial Sequence: Synthetic oligonucleotide
ctcaacaccctcctggaaagagg

SEQ ID NO: 294 - DNA, 23 bp, Artificial Sequence
  Description of Artificial Sequence: Synthetic oligonucleotide
cccagtattctcctctttccagg

SEQ ID NO: 295 - DNA, 23 bp, Artificial Sequence
  Description of Artificial Sequence: Synthetic oligonucleotide
tcctggaaagaggagaatactgg

SEQ ID NO: 296 - DNA, 23 bp, Artificial Sequence
  Description of Artificial Sequence: Synthetic oligonucleotide
cctggaaagaggagaatactggg

SEQ ID NO: 297 - DNA, 23 bp, Artificial Sequence
  Description of Artificial Sequence: Synthetic oligonucleotide
ctggaaagaggagaatactgggg

SEQ ID NO: 298 - DNA, 23 bp, Artificial Sequence
  Description of Artificial Sequence: Synthetic oligonucleotide
ggagaatactggggatatcctgg

SEQ ID NO: 299 - DNA, 23 bp, Artificial Sequence
  Description of Artificial Sequence: Synthetic oligonucleotide
gagaatactggggatatcctggg

SEQ ID NO: 300 - DNA, 23 bp, Artificial Sequence
  Description of Artificial Sequence: Synthetic oligonucleotide
agaatactggggatatcctgggg

SEQ ID NO: 301 - DNA, 23 bp, Artificial Sequence
  Description of Artificial Sequence: Synthetic oligonucleotide
cccacttccagaaagaccccagg

SEQ ID NO: 302 - DNA, 23 bp, Artificial Sequence
  Description of Artificial Sequence: Synthetic oligonucleotide
gggatatcctggggtctttctgg

SEQ ID NO: 303 - DNA, 23 bp, Artificial Sequence
  Description of Artificial Sequence: Synthetic oligonucleotide
tcctggggtctttctggaagtgg

SEQ ID NO: 304 - DNA, 23 bp, Artificial Sequence
  Description of Artificial Sequence: Synthetic oligonucleotide
cctggggtctttctggaagtggg

SEQ ID NO: 305 - DNA, 23 bp, Artificial Sequence
  Description of Artificial Sequence: Synthetic oligonucleotide
tgggagaatcagctttgacttgg

SEQ ID NO: 306 - DNA, 23 bp, Artificial Sequence
  Description of Artificial Sequence: Synthetic oligonucleotide
gggagaatcagctttgacttggg

SEQ ID NO: 307 - DNA, 23 bp, Artificial Sequence
  Description of Artificial Sequence: Synthetic oligonucleotide
gcagtgtgcagaatagagtgagg

SEQ ID NO: 308 - DNA, 23 bp, Artificial Sequence
  Description of Artificial Sequence: Synthetic oligonucleotide
cagtgtgcagaatagagtgaggg

SEQ ID NO: 309 - DNA, 23 bp, Artificial Sequence
  Description of Artificial Sequence: Synthetic oligonucleotide
agtgtgcagaatagagtgagggg

SEQ ID NO: 310 - DNA, 23 bp, Artificial Sequence
  Description of Artificial Sequence: Synthetic oligonucleotide
gtgtgcagaatagagtgaggggg

SEQ ID NO: 311 - DNA, 23 bp, Artificial Sequence
  Description of Artificial Sequence: Synthetic oligonucleotide
tgtgcagaatagagtgagggggg

SEQ ID NO: 312 - DNA, 23 bp, Artificial Sequence
  Description of Artificial Sequence: Synthetic oligonucleotide
ggggatgtcagaaagatgagagg

SEQ ID NO: 313 - DNA, 23 bp, Artificial Sequence
  Description of Artificial Sequence: Synthetic oligonucleotide
gggatgtcagaaagatgagaggg

SEQ ID NO: 314 - DNA, 23 bp, Artificial Sequence
  Description of Artificial Sequence: Synthetic oligonucleotide
agaaagatgagagggatatgagg

SEQ ID NO: 315 - DNA, 23 bp, Artificial Sequence
  Description of Artificial Sequence: Synthetic oligonucleotide
gtgcttgcattttgatgttgagg

SEQ ID NO: 316 - DNA, 23 bp, Artificial Sequence
  Description of Artificial Sequence: Synthetic oligonucleotide
aacatcaaaatgcaagcacctgg

SEQ ID NO: 317 - DNA, 23 bp, Artificial Sequence
  Description of Artificial Sequence: Synthetic oligonucleotide
gcagagataataaaaatgccagg

SEQ ID NO: 318 - DNA, 23 bp, Artificial Sequence
  Description of Artificial Sequence: Synthetic oligonucleotide
agagagaccaacggagaggtggg

SEQ ID NO: 319 - DNA, 23 bp, Artificial Sequence
  Description of Artificial Sequence: Synthetic oligonucleotide
cagagagaccaacggagaggtgg

SEQ ID NO: 320 - DNA, 23 bp, Artificial Sequence
  Description of Artificial Sequence: Synthetic oligonucleotide
atctctgcccacctctccgttgg

SEQ ID NO: 321 - DNA, 23 bp, Artificial Sequence
  Description of Artificial Sequence: Synthetic oligonucleotide
aggcagagagaccaacggagagg

SEQ ID NO: 322 - DNA, 23 bp, Artificial Sequence
  Description of Artificial Sequence: Synthetic oligonucleotide
aggaaaggcagagagaccaacgg

SEQ ID NO: 323 - DNA, 23 bp, Artificial Sequence
  Description of Artificial Sequence: Synthetic oligonucleotide
acacaattcattggcaggaaagg

SEQ ID NO: 324 - DNA, 23 bp, Artificial Sequence
  Description of Artificial Sequence: Synthetic oligonucleotide
acataacacaattcattggcagg

SEQ ID NO: 325 - DNA, 23 bp, Artificial Sequence
  Description of Artificial Sequence: Synthetic oligonucleotide
ccaaacataacacaattcattgg

SEQ ID NO: 326 - DNA, 23 bp, Artificial Sequence
  Description of Artificial Sequence: Synthetic oligonucleotide
ccaatgaattgtgttatgtttgg

SEQ ID NO: 327 - DNA, 23 bp, Artificial Sequence
  Description of Artificial Sequence: Synthetic oligonucleotide
caatgaattgtgttatgtttggg

SEQ ID NO: 328 - DNA, 23 bp, Artificial Sequence
  Description of Artificial Sequence: Synthetic oligonucleotide
gaaccctcctaggcaaattgagg

SEQ ID NO: 329 - DNA, 23 bp, Artificial Sequence
  Description of Artificial Sequence: Synthetic oligonucleotide
ttgggtgcctcaatttgcctagg

SEQ ID NO: 330 - DNA, 23 bp, Artificial Sequence
  Description of Artificial Sequence: Synthetic oligonucleotide
ggtgcctcaatttgcctaggagg

SEQ ID NO: 331 - DNA, 23 bp, Artificial Sequence
  Description of Artificial Sequence: Synthetic oligonucleotide
gtgcctcaatttgcctaggaggg

SEQ ID NO: 332 - DNA, 23 bp, Artificial Sequence
  Description of Artificial Sequence: Synthetic oligonucleotide
agaagaaatagaaccctcctagg

SEQ ID NO: 333 - DNA, 23 bp, Artificial Sequence
  Description of Artificial Sequence: Synthetic oligonucleotide
aggatcttctcctgacttagtgg

SEQ ID NO: 334 - DNA, 23 bp, Artificial Sequence
  Description of Artificial Sequence: Synthetic oligonucleotide
tgtatcttcgccactaagtcagg

SEQ ID NO: 335 - DNA, 23 bp, Artificial Sequence
  Description of Artificial Sequence: Synthetic oligonucleotide
ctgttgcagggcatgctataagg

SEQ ID NO: 336 - DNA, 23 bp, Artificial Sequence
  Description of Artificial Sequence: Synthetic oligonucleotide
ttacaggtgacactgttgcaggg

SEQ ID NO: 337 - DNA, 23 bp, Artificial Sequence
  Description of Artificial Sequence: Synthetic oligonucleotide
cttacaggtgacactgttgcagg

SEQ ID NO: 338 - DNA, 23 bp, Artificial Sequence
  Description of Artificial Sequence: Synthetic oligonucleotide
ctgcaacagtgtcacctgtaagg

SEQ ID NO: 339 - DNA, 23 bp, Artificial Sequence
  Description of Artificial Sequence: Synthetic oligonucleotide
tgcaacagtgtcacctgtaaggg

SEQ ID NO: 340 - DNA, 23 bp, Artificial Sequence
  Description of Artificial Sequence: Synthetic oligonucleotide
gtgcagagagatgcccttacagg

SEQ ID NO: 341 - DNA, 23 bp, Artificial Sequence
  Description of Artificial Sequence: Synthetic oligonucleotide
tctctgcacagccacagtgaagg

SEQ ID NO: 342 - DNA, 23 bp, Artificial Sequence
  Description of Artificial Sequence: Synthetic oligonucleotide
cctttgaggatccttcactgtgg

SEQ ID NO: 343 - DNA, 23 bp, Artificial Sequence
  Description of Artificial Sequence: Synthetic oligonucleotide
ccacagtgaaggatcctcaaagg

SEQ ID NO: 344 - DNA, 23 bp, Artificial Sequence
  Description of Artificial Sequence: Synthetic oligonucleotide
gaaagccctcaatacctttgagg

SEQ ID NO: 345 - DNA, 23 bp, Artificial Sequence
  Description of Artificial Sequence: Synthetic oligonucleotide
aaggatcctcaaaggtattgagg

SEQ ID NO: 346 - DNA, 23 bp, Artificial Sequence
  Description of Artificial Sequence: Synthetic oligonucleotide
aggatcctcaaaggtattgaggg

SEQ ID NO: 347 - DNA, 23 bp, Artificial Sequence
  Description of Artificial Sequence: Synthetic oligonucleotide
gctgtaaagatggctcttgatgg

SEQ ID NO: 348 - DNA, 23 bp, Artificial Sequence
  Description of Artificial Sequence: Synthetic oligonucleotide
aaagaggtttgctgtaaagatgg

SEQ ID NO: 349 - DNA, 23 bp, Artificial Sequence
  Description of Artificial Sequence: Synthetic oligonucleotide
tctgggctctgaagggaaagagg

SEQ ID NO: 350 - DNA, 23 bp, Artificial Sequence
  Description of Artificial Sequence: Synthetic oligonucleotide
gcactcttctgggctctgaaggg

SEQ ID NO: 351 - DNA, 23 bp, Artificial Sequence
  Description of Artificial Sequence: Synthetic oligonucleotide
agcactcttctgggctctgaagg

SEQ ID NO: 352 - DNA, 23 bp, Artificial Sequence
  Description of Artificial Sequence: Synthetic oligonucleotide
cagctggtcagcactcttctggg

SEQ ID NO: 353 - DNA, 23 bp, Artificial Sequence
  Description of Artificial Sequence: Synthetic oligonucleotide
ccagctggtcagcactcttctgg

SEQ ID NO: 354 - DNA, 23 bp, Artificial Sequence
  Description of Artificial Sequence: Synthetic oligonucleotide
ccagaagagtgctgaccagctgg

SEQ ID NO: 355 - DNA, 23 bp, Artificial Sequence
  Description of Artificial Sequence: Synthetic oligonucleotide
aaaaaaccctgttttccagctgg

SEQ ID NO: 356 - DNA, 23 bp, Artificial Sequence
  Description of Artificial Sequence: Synthetic oligonucleotide
gtgctgaccagctggaaaacagg

SEQ ID NO: 357 - DNA, 23 bp, Artificial Sequence
  Description of Artificial Sequence: Synthetic oligonucleotide
tgctgaccagctggaaaacaggg

SEQ ID NO: 358 - DNA, 23 bp, Artificial Sequence
  Description of Artificial Sequence: Synthetic oligonucleotide
ggggaagttgatctaatatctgg

SEQ ID NO: 359 - DNA, 23 bp, Artificial Sequence
  Description of Artificial Sequence: Synthetic oligonucleotide
ttgcctgcaggggtatggtgggg

SEQ ID NO: 360 - DNA, 23 bp, Artificial Sequence
  Description of Artificial Sequence: Synthetic oligonucleotide
tttgcctgcaggggtatggtggg

SEQ ID NO: 361 - DNA, 23 bp, Artificial Sequence
  Description of Artificial Sequence: Synthetic oligonucleotide
ctttgcctgcaggggtatggtgg

SEQ ID NO: 362 - DNA, 23 bp, Artificial Sequence
  Description of Artificial Sequence: Synthetic oligonucleotide
aggctttgcctgcaggggtatgg

SEQ ID NO: 363 - DNA, 23 bp, Artificial Sequence
  Description of Artificial Sequence: Synthetic oligonucleotide
cttccccaccatacccctgcagg

SEQ ID NO: 364 - DNA, 23 bp, Artificial Sequence
  Description of Artificial Sequence: Synthetic oligonucleotide
ttaagaggctttgcctgcagggg

SEQ ID NO: 365 - DNA, 23 bp, Artificial Sequence
  Description of Artificial Sequence: Synthetic oligonucleotide
attaagaggctttgcctgcaggg

SEQ ID NO: 366 - DNA, 23 bp, Artificial Sequence
  Description of Artificial Sequence: Synthetic oligonucleotide
aattaagaggctttgcctgcagg

SEQ ID NO: 367 - DNA, 23 bp, Artificial Sequence
  Description of Artificial Sequence: Synthetic oligonucleotide
gctgcaggaagctaattaagagg

SEQ ID NO: 368 - DNA, 23 bp, Artificial Sequence
  Description of Artificial Sequence: Synthetic oligonucleotide
ggcctttccagctgtgctgcagg

SEQ ID NO: 369 - DNA, 23 bp, Artificial Sequence
  Description of Artificial Sequence: Synthetic oligonucleotide
ttagcttcctgcagcacagctgg

SEQ ID NO: 370 - DNA, 23 bp, Artificial Sequence
  Description of Artificial Sequence: Synthetic oligonucleotide
ttcctgcagcacagctggaaagg

SEQ ID NO: 371 - DNA, 23 bp, Artificial Sequence
  Description of Artificial Sequence: Synthetic oligonucleotide
tgcccatcacagattacaatagg

SEQ ID NO: 372 - DNA, 23 bp, Artificial Sequence
  Description of Artificial Sequence: Synthetic oligonucleotide
aggcctattgtaatctgtgatgg

SEQ ID NO: 373 - DNA, 23 bp, Artificial Sequence
  Description of Artificial Sequence: Synthetic oligonucleotide
ggcctattgtaatctgtgatggg

SEQ ID NO: 374 - DNA, 23 bp, Artificial Sequence
  Description of Artificial Sequence: Synthetic oligonucleotide
agagtaatctaagaagtcacagg

SEQ ID NO: 375 - DNA, 23 bp, Artificial Sequence
  Description of Artificial Sequence: Synthetic oligonucleotide
tccagattctactgggacagggg

SEQ ID NO: 376 - DNA, 23 bp, Artificial Sequence
  Description of Artificial Sequence: Synthetic oligonucleotide
atccagattctactgggacaggg

SEQ ID NO: 377 - DNA, 23 bp, Artificial Sequence
  Description of Artificial Sequence: Synthetic oligonucleotide
catccagattctactgggacagg

SEQ ID NO: 378 - DNA, 23 bp, Artificial Sequence
  Description of Artificial Sequence: Synthetic oligonucleotide
ctgcgcatccagattctactggg

SEQ ID NO: 379 - DNA, 23 bp, Artificial Sequence
  Description of Artificial Sequence: Synthetic oligonucleotide
cctgcgcatccagattctactgg

SEQ ID NO: 380 - DNA, 23 bp, Artificial Sequence
  Description of Artificial Sequence: Synthetic oligonucleotide
acccctgtcccagtagaatctgg

SEQ ID NO: 381 - DNA, 23 bp, Artificial Sequence
  Description of Artificial Sequence: Synthetic oligonucleotide
ccagtagaatctggatgcgcagg

SEQ ID NO: 382 - DNA, 23 bp, Artificial Sequence
  Description of Artificial Sequence: Synthetic oligonucleotide
atgcgcaggcacatgaaccatgg

SEQ ID NO: 383 - DNA, 23 bp, Artificial Sequence
  Description of Artificial Sequence: Synthetic oligonucleotide
tgcctgcaaccattttgccatgg

SEQ ID NO: 384 - DNA, 23 bp, Artificial Sequence
  Description of Artificial Sequence: Synthetic oligonucleotide
gcacatgaaccatggcaaaatgg

SEQ ID NO: 385 - DNA, 23 bp, Artificial Sequence
  Description of Artificial Sequence: Synthetic oligonucleotide
aaccatggcaaaatggttgcagg

SEQ ID NO: 386 - DNA, 23 bp, Artificial Sequence
  Description of Artificial Sequence: Synthetic oligonucleotide
gcagccctgtggcattaacaggg

SEQ ID NO: 387 - DNA, 23 bp, Artificial Sequence
  Description of Artificial Sequence: Synthetic oligonucleotide
ggcagccctgtggcattaacagg

SEQ ID NO: 388 - DNA, 23 bp, Artificial Sequence
  Description of Artificial Sequence: Synthetic oligonucleotide
actgtccctgttaatgccacagg

SEQ ID NO: 389 - DNA, 23 bp, Artificial Sequence
  Description of Artificial Sequence: Synthetic oligonucleotide
ctgtccctgttaatgccacaggg

SEQ ID NO: 390 - DNA, 23 bp, Artificial Sequence
  Description of Artificial Sequence: Synthetic oligonucleotide
tgccaggccaggcagccctgtgg

SEQ ID NO: 391 - DNA, 23 bp, Artificial Sequence
  Description of Artificial Sequence: Synthetic oligonucleotide
gttaatgccacagggctgcctgg

SEQ ID NO: 392 - DNA, 23 bp, Artificial Sequence
  Description of Artificial Sequence: Synthetic oligonucleotide
tgccacagggctgcctggcctgg

SEQ ID NO: 393 - DNA, 23 bp, Artificial Sequence
  Description of Artificial Sequence: Synthetic oligonucleotide
acagccctgtgtgccaggccagg

SEQ ID NO: 394 - DNA, 23 bp, Artificial Sequence
  Description of Artificial Sequence: Synthetic oligonucleotide
gcgccacagccctgtgtgccagg

SEQ ID NO: 395 - DNA, 23 bp, Artificial Sequence
  Description of Artificial Sequence: Synthetic oligonucleotide
ggctgcctggcctggcacacagg

SEQ ID NO: 396 - DNA, 23 bp, Artificial Sequence
  Description of Artificial Sequence: Synthetic oligonucleotide
gctgcctggcctggcacacaggg

SEQ ID NO: 397 - DNA, 23 bp, Artificial Sequence
  Description of Artificial Sequence: Synthetic oligonucleotide
tggcctggcacacagggctgtgg

SEQ ID NO: 398 - DNA, 23 bp, Artificial Sequence
  Description of Artificial Sequence: Synthetic oligonucleotide
caacgttatccatttgcacaagg

SEQ ID NO: 399 - DNA, 23 bp, Artificial Sequence
  Description of Artificial Sequence: Synthetic oligonucleotide
gctgtggcgccttgtgcaaatgg

SEQ ID NO: 400 - DNA, 23 bp, Artificial Sequence
  Description of Artificial Sequence: Synthetic oligonucleotide
tttcactttgaatgaaaggctgg

SEQ ID NO: 401 - DNA, 23 bp, Artificial Sequence
  Description of Artificial Sequence: Synthetic oligonucleotide
cagttttcactttgaatgaaagg

SEQ ID NO: 402 - DNA, 23 bp, Artificial Sequence
  Description of Artificial Sequence: Synthetic oligonucleotide
caaagtgaaaactgttagaaagg

SEQ ID NO: 403 - DNA, 23 bp, Artificial Sequence
  Description of Artificial Sequence: Synthetic oligonucleotide
aaagtgaaaactgttagaaaggg

SEQ ID NO: 404 - DNA, 23 bp, Artificial Sequence
  Description of Artificial Sequence: Synthetic oligonucleotide
tgaaaactgttagaaagggaagg

SEQ ID NO: 405 - DNA, 23 bp, Artificial Sequence
  Description of Artificial Sequence: Synthetic oligonucleotide
aggaaaactttgctattttaagg

SEQ ID NO: 406 - DNA, 23 bp, Artificial Sequence
  Description of Artificial Sequence: Synthetic oligonucleotide
gttatttcttccttcatatcagg

SEQ ID NO: 407 - DNA, 23 bp, Artificial Sequence
  Description of Artificial Sequence: Synthetic oligonucleotide
tagcgtgctgcctgatatgaagg

SEQ ID NO: 408 - DNA, 23 bp, Artificial Sequence
  Description of Artificial Sequence: Synthetic oligonucleotide
tcgagtgctgcgcacaagcaagg

SEQ ID NO: 409 - DNA, 23 bp, Artificial Sequence
  Description of Artificial Sequence: Synthetic oligonucleotide
ggtgaggtcgaaagcaaaagcgg

SEQ ID NO: 410 - DNA, 23 bp, Artificial Sequence
  Description of Artificial Sequence: Synthetic oligonucleotide
gatctcactgtgttgtggtgagg

SEQ ID NO: 411 - DNA, 23 bp, Artificial Sequence
  Description of Artificial Sequence: Synthetic oligonucleotide
cagtagatctcactgtgttgtgg

SEQ ID NO: 412 - DNA, 23 bp, Artificial Sequence
  Description of Artificial Sequence: Synthetic oligonucleotide
agtttcacctcctgtaaaatggg

SEQ ID NO: 413 - DNA, 23 bp, Artificial Sequence
  Description of Artificial Sequence: Synthetic oligonucleotide
tgttcatgttcccattttacagg

SEQ ID NO: 414 - DNA, 23 bp, Artificial Sequence
  Description of Artificial Sequence: Synthetic oligonucleotide
cagtttcacctcctgtaaaatgg

SEQ ID NO: 415 - DNA, 23 bp, Artificial Sequence
  Description of Artificial Sequence: Synthetic oligonucleotide
tcatgttcccattttacaggagg

SEQ ID NO: 416 - DNA, 23 bp, Artificial Sequence
  Description of Artificial Sequence: Synthetic oligonucleotide
ggtgaaactgcagcttagtgagg

SEQ ID NO: 417 - DNA, 23 bp, Artificial Sequence
  Description of Artificial Sequence: Synthetic oligonucleotide
gttcagacacagaatgctgttgg

SEQ ID NO: 418 - DNA, 23 bp, Artificial Sequence
  Description of Artificial Sequence: Synthetic oligonucleotide
ttcagacacagaatgctgttggg

SEQ ID NO: 419 - DNA, 23 bp, Artificial Sequence
  Description of Artificial Sequence: Synthetic oligonucleotide
ggagagtaataactatgatatgg

SEQ ID NO: 420 - DNA, 23 bp, Artificial Sequence
  Description of Artificial Sequence: Synthetic oligonucleotide
atagcaacacagatatagctggg

SEQ ID NO: 421 - DNA, 23 bp, Artificial Sequence
  Description of Artificial Sequence: Synthetic oligonucleotide
tatagcaacacagatatagctgg

SEQ ID NO: 422 - DNA, 23 bp, Artificial Sequence
  Description of Artificial Sequence: Synthetic oligonucleotide
agctatatctgtgttgctatagg

SEQ ID NO: 423 - DNA, 23 bp, Artificial Sequence
  Description of Artificial Sequence: Synthetic oligonucleotide
gctatatctgtgttgctataggg

SEQ ID NO: 424 - DNA, 23 bp, Artificial Sequence
  Description of Artificial Sequence: Synthetic oligonucleotide
tatctgtgttgctatagggaagg

SEQ ID NO: 425 - DNA, 23 bp, Artificial Sequence
  Description of Artificial Sequence: Synthetic oligonucleotide
atctgtgttgctatagggaaggg

SEQ ID NO: 426 - DNA, 23 bp, Artificial Sequence
  Description of Artificial Sequence: Synthetic oligonucleotide
tctgtgttgctatagggaagggg

SEQ ID NO: 427 - DNA, 23 bp, Artificial Sequence
  Description of Artificial Sequence: Synthetic oligonucleotide
agtttttggtggttgatgtttgg

SEQ ID NO: 428 - DNA, 23 bp, Artificial Sequence
  Description of Artificial Sequence: Synthetic oligonucleotide
aaattcagttcagtttttggtgg

SEQ ID NO: 429 - DNA, 23 bp, Artificial Sequence
  Description of Artificial Sequence: Synthetic oligonucleotide
aggaaattcagttcagtttttgg

SEQ ID NO: 430 - DNA, 23 bp, Artificial Sequence
  Description of Artificial Sequence: Synthetic oligonucleotide
atttgaaaaccaagtgcttcagg

SEQ ID NO: 431 - DNA, 23 bp, Artificial Sequence
  Description of Artificial Sequence: Synthetic oligonucleotide
actgaatttcctgaagcacttgg

SEQ ID NO: 432 - DNA, 23 bp, Artificial Sequence
  Description of Artificial Sequence: Synthetic oligonucleotide
catcaatgctgttattcttgagg

SEQ ID NO: 433 - DNA, 23 bp, Artificial Sequence
  Description of Artificial Sequence: Synthetic oligonucleotide
gaaatgagcaagttgcttctggg

SEQ ID NO: 434 - DNA, 23 bp, Artificial Sequence
  Description of Artificial Sequence: Synthetic oligonucleotide
tgaaatgagcaagttgcttctgg

SEQ ID NO: 435 - DNA, 23 bp, Artificial Sequence
  Description of Artificial Sequence: Synthetic oligonucleotide
tgtgggtgggctgtgtacatagg

SEQ ID NO: 436 - DNA, 23 bp, Artificial Sequence
  Description of Artificial Sequence: Synthetic oligonucleotide
tcacatcggggagtgtgggtggg

SEQ ID NO: 437 - DNA, 23 bp, Artificial Sequence
  Description of Artificial Sequence: Synthetic oligonucleotide
ctcacatcggggagtgtgggtgg

SEQ ID NO: 438 - DNA, 23 bp, Artificial Sequence
  Description of Artificial Sequence: Synthetic oligonucleotide
cttctcacatcggggagtgtggg

SEQ ID NO: 439 - DNA, 23 bp, Artificial Sequence
  Description of Artificial Sequence: Synthetic oligonucleotide
ccttctcacatcggggagtgtgg

SEQ ID NO: 440 - DNA, 23 bp, Artificial Sequence
  Description of Artificial Sequence: Synthetic oligonucleotide
accctctccttctcacatcgggg

SEQ ID NO: 441 - DNA, 23 bp, Artificial Sequence
  Description of Artificial Sequence: Synthetic oligonucleotide
gaccctctccttctcacatcggg

SEQ ID NO: 442 - DNA, 23 bp, Artificial Sequence
  Description of Artificial Sequence: Synthetic oligonucleotide
tgaccctctccttctcacatcgg

SEQ ID NO: 443 - DNA, 23 bp, Artificial Sequence
  Description of Artificial Sequence: Synthetic oligonucleotide
ccacactccccgatgtgagaagg

SEQ ID NO: 444 - DNA, 23 bp, Artificial Sequence
  Description of Artificial Sequence: Synthetic oligonucleotide
ctccccgatgtgagaaggagagg

SEQ ID NO: 445 - DNA, 23 bp, Artificial Sequence
  Description of Artificial Sequence: Synthetic oligonucleotide
tccccgatgtgagaaggagaggg

SEQ ID NO: 446 - DNA, 23 bp, Artificial Sequence
  Description of Artificial Sequence: Synthetic oligonucleotide
gcagcagcagaggctgggggcgg

SEQ ID NO: 447 - DNA, 23 bp, Artificial Sequence
  Description of Artificial Sequence: Synthetic oligonucleotide
gtggcagcagcagaggctggggg

SEQ ID NO: 448 - DNA, 23 bp, Artificial Sequence
  Description of Artificial Sequence: Synthetic oligonucleotide
tgtggcagcagcagaggctgggg

SEQ ID NO: 449 - DNA, 23 bp, Artificial Sequence
  Description of Artificial Sequence: Synthetic oligonucleotide
ttgtggcagcagcagaggctggg

SEQ ID NO: 450 - DNA, 23 bp, Artificial Sequence
  Description of Artificial Sequence: Synthetic oligonucleotide
cttgtggcagcagcagaggctgg

SEQ ID NO: 451 - DNA, 23 bp, Artificial Sequence
  Description of Artificial Sequence: Synthetic oligonucleotide
tgtccttgtggcagcagcagagg

SEQ ID NO: 452 - DNA, 23 bp, Artificial Sequence
  Description of Artificial Sequence: Synthetic oligonucleotide
cagcctctgctgctgccacaagg

SEQ ID NO: 453 - DNA, 23 bp, Artificial Sequence
  Description of Artificial Sequence: Synthetic oligonucleotide
ttccactgctgctgtccttgtgg

SEQ ID NO: 454 - DNA, 23 bp, Artificial Sequence
  Description of Artificial Sequence: Synthetic oligonucleotide
tgccacaaggacagcagcagtgg

SEQ ID NO: 455 - DNA, 23 bp, Artificial Sequence
  Description of Artificial Sequence: Synthetic oligonucleotide
gcagtggaaacattcagcaaagg

SEQ ID NO: 456 - DNA, 23 bp, Artificial Sequence
  Description of Artificial Sequence: Synthetic oligonucleotide
aacattcagcaaaggaatgttgg

SEQ ID NO: 457 - DNA, 23 bp, Artificial Sequence
  Description of Artificial Sequence: Synthetic oligonucleotide
cagtgagtctcttgtggatgtgg

SEQ ID NO: 458 - DNA, 23 bp, Artificial Sequence
  Description of Artificial Sequence: Synthetic oligonucleotide
aatcttcagtgagtctcttgtgg

SEQ ID NO: 459 - DNA, 23 bp, Artificial Sequence
  Description of Artificial Sequence: Synthetic oligonucleotide
tgccactttccgtaggcgtttgg

SEQ ID NO: 460 - DNA, 23 bp, Artificial Sequence
  Description of Artificial Sequence: Synthetic oligonucleotide
gaagattcgccaaacgcctacgg

SEQ ID NO: 461 - DNA, 23 bp, Artificial Sequence
  Description of Artificial Sequence: Synthetic oligonucleotide
aattccctgccactttccgtagg

SEQ ID NO: 462 - DNA, 23 bp, Artificial Sequence
  Description of Artificial Sequence: Synthetic oligonucleotide
cgccaaacgcctacggaaagtgg

SEQ ID NO: 463 - DNA, 23 bp, Artificial Sequence
  Description of Artificial Sequence: Synthetic oligonucleotide
aaacgcctacggaaagtggcagg

SEQ ID NO: 464 - DNA, 23 bp, Artificial Sequence
  Description of Artificial Sequence: Synthetic oligonucleotide
aacgcctacggaaagtggcaggg

SEQ ID NO: 465 - DNA, 23 bp, Artificial Sequence
  Description of Artificial Sequence: Synthetic oligonucleotide
gctcttcaatctgatcaagcagg

SEQ ID NO: 466 - DNA, 23 bp, Artificial Sequence
  Description of Artificial Sequence: Synthetic oligonucleotide
tgatcagattgaagagcttctgg

SEQ ID NO: 467 - DNA, 23 bp, Artificial Sequence
  Description of Artificial Sequence: Synthetic oligonucleotide
gatcagattgaagagcttctggg

SEQ ID NO: 468 - DNA, 23 bp, Artificial Sequence
  Description of Artificial Sequence: Synthetic oligonucleotide
gggattctgtaacaataaatagg

SEQ ID NO: 469 - DNA, 23 bp, Artificial Sequence
  Description of Artificial Sequence: Synthetic oligonucleotide
tctgtaacaataaataggaccgg

SEQ ID NO: 470 - DNA, 23 bp, Artificial Sequence
  Description of Artificial Sequence: Synthetic oligonucleotide
ctgtaacaataaataggaccggg

SEQ ID NO: 471 - DNA, 23 bp, Artificial Sequence
  Description of Artificial Sequence: Synthetic oligonucleotide
tgtaacaataaataggaccgggg

SEQ ID NO: 472 - DNA, 23 bp, Artificial Sequence
  Description of Artificial Sequence: Synthetic oligonucleotide
gtaacaataaataggaccggggg

SEQ ID NO: 473 - DNA, 23 bp, Artificial Sequence
  Description of Artificial Sequence: Synthetic oligonucleotide
caataaataggaccgggggctgg

SEQ ID NO: 474 - DNA, 23 bp, Artificial Sequence
  Description of Artificial Sequence: Synthetic oligonucleotide
gctggccatactccagcccccgg

SEQ ID NO: 475 - DNA, 23 bp, Artificial Sequence
  Description of Artificial Sequence: Synthetic oligonucleotide
taggaccgggggctggagtatgg

SEQ ID NO: 476 - DNA, 23 bp, Artificial Sequence
  Description of Artificial Sequence: Synthetic oligonucleotide
gggctggagtatggccagcaagg

SEQ ID NO: 477 - DNA, 23 bp, Artificial Sequence
  Description of Artificial Sequence: Synthetic oligonucleotide
aacccctgaagagtccttgctgg

SEQ ID NO: 478 - DNA, 23 bp, Artificial Sequence
  Description of Artificial Sequence: Synthetic oligonucleotide
atggccagcaaggactcttcagg

SEQ ID NO: 479 - DNA, 23 bp, Artificial Sequence
  Description of Artificial Sequence: Synthetic oligonucleotide
tggccagcaaggactcttcaggg

SEQ ID NO: 480 - DNA, 23 bp, Artificial Sequence
  Description of Artificial Sequence: Synthetic oligonucleotide
ggccagcaaggactcttcagggg

SEQ ID NO: 481 - DNA, 23 bp, Artificial Sequence
  Description of Artificial Sequence: Synthetic oligonucleotide
ggactcttcaggggttattcagg

SEQ ID NO: 482 - DNA, 23 bp, Artificial Sequence
  Description of Artificial Sequence: Synthetic oligonucleotide
gactcttcaggggttattcaggg

SEQ ID NO: 483 - DNA, 23 bp, Artificial Sequence
  Description of Artificial Sequence: Synthetic oligonucleotide
gtttgctgcctaggattcacagg

SEQ ID NO: 484 - DNA, 23 bp, Artificial Sequence
  Description of Artificial Sequence: Synthetic oligonucleotide
ctgtctaacctgtgaatcctagg

SEQ ID NO: 485 - DNA, 23 bp, Artificial Sequence
  Description of Artificial Sequence: Synthetic oligonucleotide
ctggtttctgtttgctgcctagg

SEQ ID NO: 486 - DNA, 23 bp, Artificial Sequence
  Description of Artificial Sequence: Synthetic oligonucleotide
ctaggcagcaaacagaaaccagg

SEQ ID NO: 487 - DNA, 23 bp, Artificial Sequence
  Description of Artificial Sequence: Synthetic oligonucleotide
cctccagatttctgaatacctgg

SEQ ID NO: 488 - DNA, 23 bp, Artificial Sequence
  Description of Artificial Sequence: Synthetic oligonucleotide
aaaccaggtattcagaaatctgg

SEQ ID NO: 489 - DNA, 23 bp, Artificial Sequence
  Description of Artificial Sequence: Synthetic oligonucleotide
ccaggtattcagaaatctggagg

SEQ ID NO: 490 - DNA, 23 bp, Artificial Sequence
  Description of Artificial Sequence: Synthetic oligonucleotide
attcagaaatctggaggatttgg

SEQ ID NO: 491 - DNA, 23 bp, Artificial Sequence
  Description of Artificial Sequence: Synthetic oligonucleotide
gaaatctggaggatttggtcagg

SEQ ID NO: 492 - DNA, 23 bp, Artificial Sequence
  Description of Artificial Sequence: Synthetic oligonucleotide
ggatttggtcaggcccagctagg

SEQ ID NO: 493 - DNA, 23 bp, Artificial Sequence
  Description of Artificial Sequence: Synthetic oligonucleotide
atgcctccctagtcctagctggg

SEQ ID NO: 494 - DNA, 23 bp, Artificial Sequence
  Description of Artificial Sequence: Synthetic oligonucleotide
catgcctccctagtcctagctgg

SEQ ID NO: 495 - DNA, 23 bp, Artificial Sequence
  Description of Artificial Sequence: Synthetic oligonucleotide
ggtcaggcccagctaggactagg

SEQ ID NO: 496 - DNA, 23 bp, Artificial Sequence
  Description of Artificial Sequence: Synthetic oligonucleotide
gtcaggcccagctaggactaggg

SEQ ID NO: 497 - DNA, 23 bp, Artificial Sequence
  Description of Artificial Sequence: Synthetic oligonucleotide
aggcccagctaggactagggagg

SEQ ID NO: 498 - DNA, 23 bp, Artificial Sequence
  Description of Artificial Sequence: Synthetic oligonucleotide
cagctaggactagggaggcatgg

SEQ ID NO: 499 - DNA, 23 bp, Artificial Sequence
  Description of Artificial Sequence: Synthetic oligonucleotide
agctaggactagggaggcatggg

SEQ ID NO: 500 - DNA, 23 bp, Artificial Sequence
  Description of Artificial Sequence: Synthetic oligonucleotide
agggaggcatgggcctctgctgg

SEQ ID NO: 501 - DNA, 23 bp, Artificial Sequence
  Description of Artificial Sequence: Synthetic oligonucleotide
gaagggaccacagccagcagagg

SEQ ID NO: 502 - DNA, 23 bp, Artificial Sequence
  Description of Artificial Sequence: Synthetic oligonucleotide
gcatgggcctctgctggctgtgg

SEQ ID NO: 503 - DNA, 23 bp, Artificial Sequence
  Description of Artificial Sequence: Synthetic oligonucleotide
gagaagtgaaggctggagaaggg

SEQ ID NO: 504 - DNA, 23 bp, Artificial Sequence
  Description of Artificial Sequence: Synthetic oligonucleotide
agagaagtgaaggctggagaagg

SEQ ID NO: 505 - DNA, 23 bp, Artificial Sequence
  Description of Artificial Sequence: Synthetic oligonucleotide
gggacaagagaagtgaaggctgg

SEQ ID NO: 506 - DNA, 23 bp, Artificial Sequence
  Description of Artificial Sequence: Synthetic oligonucleotide
tctagggacaagagaagtgaagg

SEQ ID NO: 507 - DNA, 23 bp, Artificial Sequence
  Description of Artificial Sequence: Synthetic oligonucleotide
tgaatccatgtaaggatctaggg

SEQ ID NO: 508 - DNA, 23 bp, Artificial Sequence
  Description of Artificial Sequence: Synthetic oligonucleotide
atgaatccatgtaaggatctagg

SEQ ID NO: 509 - DNA, 23 bp, Artificial Sequence
  Description of Artificial Sequence: Synthetic oligonucleotide
cttgtccctagatccttacatgg

SEQ ID NO: 510 - DNA, 23 bp, Artificial Sequence
  Description of Artificial Sequence: Synthetic oligonucleotide
agcattaatgaatccatgtaagg

SEQ ID NO: 511 - DNA, 23 bp, Artificial Sequence
  Description of Artificial Sequence: Synthetic oligonucleotide
ttaatgctcattgtccctcctgg

SEQ ID NO: 512 - DNA, 23 bp, Artificial Sequence
  Description of Artificial Sequence: Synthetic oligonucleotide
taatgctcattgtccctcctggg

SEQ ID NO: 513 - DNA, 23 bp, Artificial Sequence
  Description of Artificial Sequence: Synthetic oligonucleotide
gaaagtgagtgggcccaggaggg

SEQ ID NO: 514 - DNA, 23 bp, Artificial Sequence
  Description of Artificial Sequence: Synthetic oligonucleotide
tgaaagtgagtgggcccaggagg

SEQ ID NO: 515 - DNA, 23 bp, Artificial Sequence
  Description of Artificial Sequence: Synthetic oligonucleotide
aggtgaaagtgagtgggcccagg

SEQ ID NO: 516 - DNA, 23 bp, Artificial Sequence
  Description of Artificial Sequence: Synthetic oligonucleotide
ttcaacaggtgaaagtgagtggg

SEQ ID NO: 517 - DNA, 23 bp, Artificial Sequence
  Description of Artificial Sequence: Synthetic oligonucleotide
gttcaacaggtgaaagtgagtgg

SEQ ID NO: 518 - DNA, 23 bp, Artificial Sequence
  Description of Artificial Sequence: Synthetic oligonucleotide
tggccagttttttgttcaacagg

SEQ ID NO: 519 - DNA, 23 bp, Artificial Sequence
  Description of Artificial Sequence: Synthetic oligonucleotide
tcacctgttgaacaaaaaactgg

SEQ ID NO: 520 - DNA, 23 bp, Artificial Sequence
  Description of Artificial Sequence: Synthetic oligonucleotide
tgaacaaaaaactggccaagagg

SEQ ID NO: 521 - DNA, 23 bp, Artificial Sequence
  Description of Artificial Sequence: Synthetic oligonucleotide
gtgatatgactgtcacctcttgg

SEQ ID NO: 522 - DNA, 23 bp, Artificial Sequence
  Description of Artificial Sequence: Synthetic oligonucleotide
tctctgccctgtctcttctgcgg

SEQ ID NO: 523 - DNA, 23 bp, Artificial Sequence
  Description of Artificial Sequence: Synthetic oligonucleotide
catatcaccgcagaagagacagg

SEQ ID NO: 524 - DNA, 23 bp, Artificial Sequence
  Description of Artificial Sequence: Synthetic oligonucleotide
atatcaccgcagaagagacaggg

SEQ ID NO: 525 - DNA, 23 bp, Artificial Sequence
  Description of Artificial Sequence: Synthetic oligonucleotide
gagacagggcagagaaatgaagg

SEQ ID NO: 526 - DNA, 23 bp, Artificial Sequence
  Description of Artificial Sequence: Synthetic oligonucleotide
agacagggcagagaaatgaaggg

SEQ ID NO: 527 - DNA, 23 bp, Artificial Sequence
  Description of Artificial Sequence: Synthetic oligonucleotide
gacagggcagagaaatgaagggg

SEQ ID NO: 528 - DNA, 23 bp, Artificial Sequence
  Description of Artificial Sequence: Synthetic oligonucleotide
agagaaatgaaggggcagaatgg

SEQ ID NO: 529 - DNA, 23 bp, Artificial Sequence
  Description of Artificial Sequence: Synthetic oligonucleotide
tcagagtcaggcttttgggtggg

SEQ ID NO: 530 - DNA, 23 bp, Artificial Sequence
  Description of Artificial Sequence: Synthetic oligonucleotide
ttcagagtcaggcttttgggtgg

SEQ ID NO: 531 - DNA, 23 bp, Artificial Sequence
  Description of Artificial Sequence: Synthetic oligonucleotide
atattcagagtcaggcttttggg

SEQ ID NO: 532 - DNA, 23 bp, Artificial Sequence
  Description of Artificial Sequence: Synthetic oligonucleotide
aatattcagagtcaggcttttgg

SEQ ID NO: 533 - DNA, 23 bp, Artificial Sequence
  Description of Artificial Sequence: Synthetic oligonucleotide
attctcaaatattcagagtcagg

SEQ ID NO: 534 - DNA, 23 bp, Artificial Sequence
  Description of Artificial Sequence: Synthetic oligonucleotide
aattgttcaagttcctgcagagg

SEQ ID NO: 535 - DNA, 23 bp, Artificial Sequence
  Description of Artificial Sequence: Synthetic oligonucleotide
ccccatcatgattcctctgcagg

SEQ ID NO: 536 - DNA, 23 bp, Artificial Sequence
  Description of Artificial Sequence: Synthetic oligonucleotide
ttcctgcagaggaatcatgatgg

SEQ ID NO: 537 - DNA, 23 bp, Artificial Sequence
  Description of Artificial Sequence: Synthetic oligonucleotide
tcctgcagaggaatcatgatggg

SEQ ID NO: 538 - DNA, 23 bp, Artificial Sequence
  Description of Artificial Sequence: Synthetic oligonucleotide
cctgcagaggaatcatgatgggg

SEQ ID NO: 539 - DNA, 23 bp, Artificial Sequence
  Description of Artificial Sequence: Synthetic oligonucleotide
ggaatcatgatggggacagtagg

SEQ ID NO: 540 - DNA, 23 bp, Artificial Sequence
  Description of Artificial Sequence: Synthetic oligonucleotide
tgtagtttttactgcaatattgg

SEQ ID NO: 541 - DNA, 23 bp, Artificial Sequence
  Description of Artificial Sequence: Synthetic oligonucleotide
tgcacatcaagtgatgtctgtgg

SEQ ID NO: 542 - DNA, 23 bp, Artificial Sequence
  Description of Artificial Sequence: Synthetic oligonucleotide
catcaagtgatgtctgtggatgg

SEQ ID NO: 543 - DNA, 23 bp, Artificial Sequence
  Description of Artificial Sequence: Synthetic oligonucleotide
gatggcattcttaaagtaacagg

SEQ ID NO: 544 - DNA, 23 bp, Artificial Sequence
  Description of Artificial Sequence: Synthetic oligonucleotide
atggcattcttaaagtaacaggg

SEQ ID NO: 545 - DNA, 23 bp, Artificial Sequence
  Description of Artificial Sequence: Synthetic oligonucleotide
taaagaaatacttcatcctttgg

SEQ ID NO: 546 - DNA, 23 bp, Artificial Sequence
  Description of Artificial Sequence: Synthetic oligonucleotide
aaagaaatacttcatcctttggg

SEQ ID NO: 547 - DNA, 23 bp, Artificial Sequence
  Description of Artificial Sequence: Synthetic oligonucleotide
gaacttcaggtatcacccaaagg

SEQ ID NO: 548 - DNA, 23 bp, Artificial Sequence
  Description of Artificial Sequence: Synthetic oligonucleotide
ctccaagctcagagaacttcagg

SEQ ID NO: 549 - DNA, 23 bp, Artificial Sequence
  Description of Artificial Sequence: Synthetic oligonucleotide
tacctgaagttctctgagcttgg

SEQ ID NO: 550 - DNA, 23 bp, Artificial Sequence
  Description of Artificial Sequence: Synthetic oligonucleotide
ctgaagttctctgagcttggagg

SEQ ID NO: 551 - DNA, 23 bp, Artificial Sequence
  Description of Artificial Sequence: Synthetic oligonucleotide
aataaaacaaacaatactgaggg

SEQ ID NO: 552 - DNA, 23 bp, Artificial Sequence
  Description of Artificial Sequence: Synthetic oligonucleotide
aaataaaacaaacaatactgagg

SEQ ID NO: 553 - DNA, 23 bp, Artificial Sequence
  Description of Artificial Sequence: Synthetic oligonucleotide
ctgactgaatcacaagtcagagg

SEQ ID NO: 554 - DNA, 23 bp, Artificial Sequence
  Description of Artificial Sequence: Synthetic oligonucleotide
gtcagatgcatgcctgcctctgg

SEQ ID NO: 555 - DNA, 23 bp, Artificial Sequence
  Description of Artificial Sequence: Synthetic oligonucleotide
gatcttcctgagccagaggcagg

SEQ ID NO: 556 - DNA, 23 bp, Artificial Sequence
  Description of Artificial Sequence: Synthetic oligonucleotide
ggttgatcttcctgagccagagg

SEQ ID NO: 557 - DNA, 23 bp, Artificial Sequence
  Description of Artificial Sequence: Synthetic oligonucleotide
tgcatgcctgcctctggctcagg

SEQ ID NO: 558 - DNA, 23 bp, Artificial Sequence
  Description of Artificial Sequence: Synthetic oligonucleotide
aggcgtggtcagtcaggagaggg

SEQ ID NO: 559 - DNA, 23 bp, Artificial Sequence
  Description of Artificial Sequence: Synthetic oligonucleotide
gaggcgtggtcagtcaggagagg

SEQ ID NO: 560 - DNA, 23 bp, Artificial Sequence
  Description of Artificial Sequence: Synthetic oligonucleotide
caggagaggcgtggtcagtcagg

SEQ ID NO: 561 - DNA, 23 bp, Artificial Sequence
  Description of Artificial Sequence: Synthetic oligonucleotide
gtggtcagtcaggagaggcgtgg

SEQ ID NO: 562 - DNA, 23 bp, Artificial Sequence
  Description of Artificial Sequence: Synthetic oligonucleotide
gctacgtggtcagtcaggagagg

SEQ ID NO: 563 - DNA, 23 bp, Artificial Sequence
  Description of Artificial Sequence: Synthetic oligonucleotide
gctgtgctacgtggtcagtcagg

SEQ ID NO: 564 - DNA, 23 bp, Artificial Sequence
  Description of Artificial Sequence: Synthetic oligonucleotide
aaggaagctgctgtgctacgtgg

SEQ ID NO: 565 - DNA, 23 bp, Artificial Sequence
  Description of Artificial Sequence: Synthetic oligonucleotide
cacagcagcttcctttccctagg

SEQ ID NO: 566 - DNA, 23 bp, Artificial Sequence
  Description of Artificial Sequence: Synthetic oligonucleotide
cattaggagcccctagggaaagg

SEQ ID NO: 567 - DNA, 23 bp, Artificial Sequence
  Description of Artificial Sequence: Synthetic oligonucleotide
acagcagcttcctttccctaggg

SEQ ID NO: 568 - DNA, 23 bp, Artificial Sequence
  Description of Artificial Sequence: Synthetic oligonucleotide
cagcagcttcctttccctagggg

SEQ ID NO: 569 - DNA, 23 bp, Artificial Sequence
  Description of Artificial Sequence: Synthetic oligonucleotide
agcttcattaggagcccctaggg

SEQ ID NO: 570 - DNA, 23 bp, Artificial Sequence
  Description of Artificial Sequence: Synthetic oligonucleotide
aagcttcattaggagcccctagg

SEQ ID NO: 571 - DNA, 23 bp, Artificial Sequence
  Description of Artificial Sequence: Synthetic oligonucleotide
gtgattgtgaaagcttcattagg

SEQ ID NO: 572 - DNA, 23 bp, Artificial Sequence
  Description of Artificial Sequence: Synthetic oligonucleotide
atgaagctttcacaatcacctgg

SEQ ID NO: 573 - DNA, 23 bp, Artificial Sequence
  Description of Artificial Sequence: Synthetic oligonucleotide
acccaaactgtgctcaggccagg

SEQ ID NO: 574 - DNA, 23 bp, Artificial Sequence
  Description of Artificial Sequence: Synthetic oligonucleotide
tcctgacccaaactgtgctcagg

SEQ ID NO: 575 - DNA, 23 bp, Artificial Sequence
  Description of Artificial Sequence: Synthetic oligonucleotide
cacctggcctgagcacagtttgg

SEQ ID NO: 576 - DNA, 23 bp, Artificial Sequence
  Description of Artificial Sequence: Synthetic oligonucleotide
acctggcctgagcacagtttggg

SEQ ID NO: 577 - DNA, 23 bp, Artificial Sequence
  Description of Artificial Sequence: Synthetic oligonucleotide
gcctgagcacagtttgggtcagg

SEQ ID NO: 578 - DNA, 23 bp, Artificial Sequence
  Description of Artificial Sequence: Synthetic oligonucleotide
gcacagtttgggtcaggacttgg

SEQ ID NO: 579 - DNA, 23 bp, Artificial Sequence
  Description of Artificial Sequence: Synthetic oligonucleotide
tttccagaaccacaggattttgg

SEQ ID NO: 580 - DNA, 23 bp, Artificial Sequence
  Description of Artificial Sequence: Synthetic oligonucleotide
catgcaaaaccaaaatcctgtgg

SEQ ID NO: 581 - DNA, 23 bp, Artificial Sequence
  Description of Artificial Sequence: Synthetic oligonucleotide
gaagccttttccagaaccacagg

SEQ ID NO: 582 - DNA, 23 bp, Artificial Sequence
  Description of Artificial Sequence: Synthetic oligonucleotide
aaaccaaaatcctgtggttctgg

SEQ ID NO: 583 - DNA, 23 bp, Artificial Sequence
  Description of Artificial Sequence: Synthetic oligonucleotide
aaatcctgtggttctggaaaagg

SEQ ID NO: 584 - DNA, 23 bp, Artificial Sequence
  Description of Artificial Sequence: Synthetic oligonucleotide
agcagagtgtaaatgtctggggg

SEQ ID NO: 585 - DNA, 23 bp, Artificial Sequence
  Description of Artificial Sequence: Synthetic oligonucleotide
aagcagagtgtaaatgtctgggg

SEQ ID NO: 586 - DNA, 23 bp, Artificial Sequence
  Description of Artificial Sequence: Synthetic oligonucleotide
aaagcagagtgtaaatgtctggg

SEQ ID NO: 587 - DNA, 23 bp, Artificial Sequence
  Description of Artificial Sequence: Synthetic oligonucleotide
aaaagcagagtgtaaatgtctgg

SEQ ID NO: 588 - DNA, 23 bp, Artificial Sequence
  Description of Artificial Sequence: Synthetic oligonucleotide
tttacactctgctttttcacagg

SEQ ID NO: 589 - DNA, 23 bp, Artificial Sequence
  Description of Artificial Sequence: Synthetic oligonucleotide
ttacactctgctttttcacaggg

SEQ ID NO: 590 - DNA, 23 bp, Artificial Sequence
  Description of Artificial Sequence: Synthetic oligonucleotide
gctttttcacagggtccctgagg

SEQ ID NO: 591 - DNA, 23 bp, Artificial Sequence
  Description of Artificial Sequence: Synthetic oligonucleotide
ccagatccaaagaatcctcaggg

SEQ ID NO: 592 - DNA, 23 bp, Artificial Sequence
  Description of Artificial Sequence: Synthetic oligonucleotide
cccagatccaaagaatcctcagg

SEQ ID NO: 593 - DNA, 23 bp, Artificial Sequence
  Description of Artificial Sequence: Synthetic oligonucleotide
cagggtccctgaggattctttgg

SEQ ID NO: 594 - DNA, 23 bp, Artificial Sequence
  Description of Artificial Sequence: Synthetic oligonucleotide
ccctgaggattctttggatctgg

SEQ ID NO: 595 - DNA, 23 bp, Artificial Sequence
  Description of Artificial Sequence: Synthetic oligonucleotide
cctgaggattctttggatctggg

SEQ ID NO: 596 - DNA, 23 bp, Artificial Sequence
  Description of Artificial Sequence: Synthetic oligonucleotide
ttctttggatctgggtagtttgg

SEQ ID NO: 597 - DNA, 23 bp, Artificial Sequence
  Description of Artificial Sequence: Synthetic oligonucleotide
tctttggatctgggtagtttggg

SEQ ID NO: 598 - DNA, 23 bp, Artificial Sequence
  Description of Artificial Sequence: Synthetic oligonucleotide
ctttggatctgggtagtttgggg

SEQ ID NO: 599 - DNA, 23 bp, Artificial Sequence
  Description of Artificial Sequence: Synthetic oligonucleotide
gcatccaggcagggtgtagaagg

SEQ ID NO: 600 - DNA, 23 bp, Artificial Sequence
  Description of Artificial Sequence: Synthetic oligonucleotide
tgctccttctacaccctgcctgg

SEQ ID NO: 601 - DNA, 23 bp, Artificial Sequence
  Description of Artificial Sequence: Synthetic oligonucleotide
tggggcctagcatccaggcaggg

SEQ ID NO: 602 - DNA, 23 bp, Artificial Sequence
  Description of Artificial Sequence: Synthetic oligonucleotide
atggggcctagcatccaggcagg

SEQ ID NO: 603 - DNA, 23 bp, Artificial Sequence
  Description of Artificial Sequence: Synthetic oligonucleotide
ctagatggggcctagcatccagg

SEQ ID NO: 604 - DNA, 23 bp, Artificial Sequence
  Description of Artificial Sequence: Synthetic oligonucleotide
ctacaccctgcctggatgctagg

SEQ ID NO: 605 - DNA, 23 bp, Artificial Sequence
  Description of Artificial Sequence: Synthetic oligonucleotide
tgttgttcacattctagatgggg

SEQ ID NO: 606 - DNA, 23 bp, Artificial Sequence
  Description of Artificial Sequence: Synthetic oligonucleotide
ctgttgttcacattctagatggg

SEQ ID NO: 607 - DNA, 23 bp, Artificial Sequence
  Description of Artificial Sequence: Synthetic oligonucleotide
tctgttgttcacattctagatgg

SEQ ID NO: 608 - DNA, 23 bp, Artificial Sequence
  Description of Artificial Sequence: Synthetic oligonucleotide
agaatgtgaacaacagaacaagg

SEQ ID NO: 609 - DNA, 23 bp, Artificial Sequence
  Description of Artificial Sequence: Synthetic oligonucleotide
aggcagaacacttgtcctcaagg

SEQ ID NO: 610 - DNA, 23 bp, Artificial Sequence
  Description of Artificial Sequence: Synthetic oligonucleotide
taacactcaacagaaccttgagg

SEQ ID NO: 611 - DNA, 23 bp, Artificial Sequence
  Description of Artificial Sequence: Synthetic oligonucleotide
aagtgatgcggggaggtgggggg

SEQ ID NO: 612 - DNA, 23 bp, Artificial Sequence
  Description of Artificial Sequence: Synthetic oligonucleotide
taagtgatgcggggaggtggggg

SEQ ID NO: 613 - DNA, 23 bp, Artificial Sequence
  Description of Artificial Sequence: Synthetic oligonucleotide
gtaagtgatgcggggaggtgggg

SEQ ID NO: 614 - DNA, 23 bp, Artificial Sequence
  Description of Artificial Sequence: Synthetic oligonucleotide
tgtaagtgatgcggggaggtggg

SEQ ID NO: 615 - DNA, 23 bp, Artificial Sequence
  Description of Artificial Sequence: Synthetic oligonucleotide
ctgtaagtgatgcggggaggtgg

SEQ ID NO: 616 - DNA, 23 bp, Artificial Sequence
  Description of Artificial Sequence: Synthetic oligonucleotide
ttcctgtaagtgatgcggggagg

SEQ ID NO: 617 - DNA, 23 bp, Artificial Sequence
  Description of Artificial Sequence: Synthetic oligonucleotide
gaattcctgtaagtgatgcgggg

SEQ ID NO: 618 - DNA, 23 bp, Artificial Sequence
  Description of Artificial Sequence: Synthetic oligonucleotide
agaattcctgtaagtgatgcggg

SEQ ID NO: 619 - DNA, 23 bp, Artificial Sequence
  Description of Artificial Sequence: Synthetic oligonucleotide
cagaattcctgtaagtgatgcgg

SEQ ID NO: 620 - DNA, 23 bp, Artificial Sequence
  Description of Artificial Sequence: Synthetic oligonucleotide
cacctccccgcatcacttacagg

SEQ ID NO: 621 - DNA, 23 bp, Artificial Sequence
  Description of Artificial Sequence: Synthetic oligonucleotide
tcacttacaggaattctgtttgg

SEQ ID NO: 622 - DNA, 23 bp, Artificial Sequence
  Description of Artificial Sequence: Synthetic oligonucleotide
tacggtccttatttgatgttggg

SEQ ID NO: 623 - DNA, 23 bp, Artificial Sequence
  Description of Artificial Sequence: Synthetic oligonucleotide
atacggtccttatttgatgttgg

SEQ ID NO: 624 - DNA, 23 bp, Artificial Sequence
  Description of Artificial Sequence: Synthetic oligonucleotide
ttggaacccaacatcaaataagg

SEQ ID NO: 625 - DNA, 23 bp, Artificial Sequence
  Description of Artificial Sequence: Synthetic oligonucleotide
ccatcctctgacagtggatacgg

SEQ ID NO: 626 - DNA, 23 bp, Artificial Sequence
  Description of Artificial Sequence: Synthetic oligonucleotide
tgcttcccatcctctgacagtgg

SEQ ID NO: 627 - DNA, 23 bp, Artificial Sequence
  Description of Artificial Sequence: Synthetic oligonucleotide
aggaccgtatccactgtcagagg

SEQ ID NO: 628 - DNA, 23 bp, Artificial Sequence
  Description of Artificial Sequence: Synthetic oligonucleotide
ccgtatccactgtcagaggatgg

SEQ ID NO: 629 - DNA, 23 bp, Artificial Sequence
  Description of Artificial Sequence: Synthetic oligonucleotide
cgtatccactgtcagaggatggg

SEQ ID NO: 630 - DNA, 23 bp, Artificial Sequence
  Description of Artificial Sequence: Synthetic oligonucleotide
atgggaagcagcatgtcatctgg

SEQ ID NO: 631 - DNA, 23 bp, Artificial Sequence
  Description of Artificial Sequence: Synthetic oligonucleotide
tgggaagcagcatgtcatctggg

SEQ ID NO: 632 - DNA, 23 bp, Artificial Sequence
  Description of Artificial Sequence: Synthetic oligonucleotide
cagcatgtcatctgggacattgg

SEQ ID NO: 633 - DNA, 23 bp, Artificial Sequence
  Description of Artificial Sequence: Synthetic oligonucleotide
tcatctgggacattggagaaagg

SEQ ID NO: 634 - DNA, 23 bp, Artificial Sequence
  Description of Artificial Sequence: Synthetic oligonucleotide
ggacattggagaaaggctcctgg

SEQ ID NO: 635 - DNA, 23 bp, Artificial Sequence
  Description of Artificial Sequence: Synthetic oligonucleotide
gacattggagaaaggctcctggg

SEQ ID NO: 636 - DNA, 23 bp, Artificial Sequence
  Description of Artificial Sequence: Synthetic oligonucleotide
acattggagaaaggctcctgggg

SEQ ID NO: 637 - DNA, 23 bp, Artificial Sequence
  Description of Artificial Sequence: Synthetic oligonucleotide
cattggagaaaggctcctggggg

SEQ ID NO: 638 - DNA, 23 bp, Artificial Sequence
  Description of Artificial Sequence: Synthetic oligonucleotide
gctcaagtcccacttcccccagg

SEQ ID NO: 639 - DNA, 23 bp, Artificial Sequence
  Description of Artificial Sequence: Synthetic oligonucleotide
agaaaggctcctgggggaagtgg

SEQ ID NO: 640 - DNA, 23 bp, Artificial Sequence
  Description of Artificial Sequence: Synthetic oligonucleotide
gaaaggctcctgggggaagtggg

SEQ ID NO: 641 - DNA, 23 bp, Artificial Sequence
  Description of Artificial Sequence: Synthetic oligonucleotide
atgaacaactgagagttaaatgg

SEQ ID NO: 642 - DNA, 23 bp, Artificial Sequence
  Description of Artificial Sequence: Synthetic oligonucleotide
tgaacaactgagagttaaatggg

SEQ ID NO: 643 - DNA, 23 bp, Artificial Sequence
  Description of Artificial Sequence: Synthetic oligonucleotide
atgggagagcatcccctatcagg

SEQ ID NO: 644 - DNA, 23 bp, Artificial Sequence
  Description of Artificial Sequence: Synthetic oligonucleotide
tgggagagcatcccctatcaggg

SEQ ID NO: 645 - DNA, 23 bp, Artificial Sequence
  Description of Artificial Sequence: Synthetic oligonucleotide
tgctctcaggaccctgatagggg

SEQ ID NO: 646 - DNA, 23 bp, Artificial Sequence
  Description of Artificial Sequence: Synthetic oligonucleotide
ttgctctcaggaccctgataggg

SEQ ID NO: 647 - DNA, 23 bp, Artificial Sequence
  Description of Artificial Sequence: Synthetic oligonucleotide
gttgctctcaggaccctgatagg

SEQ ID NO: 648 - DNA, 23 bp, Artificial Sequence
  Description of Artificial Sequence: Synthetic oligonucleotide
aaccatggctggttgctctcagg

SEQ ID NO: 649 - DNA, 23 bp, Artificial Sequence
  Description of Artificial Sequence: Synthetic oligonucleotide
gtcctgagagcaaccagccatgg

SEQ ID NO: 650 - DNA, 23 bp, Artificial Sequence
  Description of Artificial Sequence: Synthetic oligonucleotide
tagctggtttaaaccatggctgg

SEQ ID NO: 651 - DNA, 23 bp, Artificial Sequence
  Description of Artificial Sequence: Synthetic oligonucleotide
tttatagctggtttaaaccatgg

SEQ ID NO: 652 - DNA, 23 bp, Artificial Sequence
  Description of Artificial Sequence: Synthetic oligonucleotide
taaacccgaggctttatagctgg

SEQ ID NO: 653 - DNA, 23 bp, Artificial Sequence
  Description of Artificial Sequence: Synthetic oligonucleotide
ttaaaccagctataaagcctcgg

SEQ ID NO: 654 - DNA, 23 bp, Artificial Sequence
  Description of Artificial Sequence: Synthetic oligonucleotide
taaaccagctataaagcctcggg

SEQ ID NO: 655 - DNA, 23 bp, Artificial Sequence
  Description of Artificial Sequence: Synthetic oligonucleotide
ctgtctatcctataaacccgagg

SEQ ID NO: 656 - DNA, 23 bp, Artificial Sequence
  Description of Artificial Sequence: Synthetic oligonucleotide
ctataaagcctcgggtttatagg

SEQ ID NO: 657 - DNA, 23 bp, Artificial Sequence
  Description of Artificial Sequence: Synthetic oligonucleotide
tataggatagacagtaacaatgg

SEQ ID NO: 658 - DNA, 23 bp, Artificial Sequence
  Description of Artificial Sequence: Synthetic oligonucleotide
cagtaacaatggcttgtctttgg

SEQ ID NO: 659 - DNA, 23 bp, Artificial Sequence
  Description of Artificial Sequence: Synthetic oligonucleotide
agtaacaatggcttgtctttggg

SEQ ID NO: 660 - DNA, 23 bp, Artificial Sequence
  Description of Artificial Sequence: Synthetic oligonucleotide
gtctttgggagccaagcagctgg

SEQ ID NO: 661 - DNA, 23 bp, Artificial Sequence
  Description of Artificial Sequence: Synthetic oligonucleotide
gcatgcctggaccagctgcttgg

SEQ ID NO: 662 - DNA, 23 bp, Artificial Sequence
  Description of Artificial Sequence: Synthetic oligonucleotide
gggagccaagcagctggtccagg

SEQ ID NO: 663 - DNA, 23 bp, Artificial Sequence
  Description of Artificial Sequence: Synthetic oligonucleotide
acagacatgctctgcatgcctgg

SEQ ID NO: 664 - DNA, 23 bp, Artificial Sequence
  Description of Artificial Sequence: Synthetic oligonucleotide
gcatgcagagcatgtctgtatgg

SEQ ID NO: 665 - DNA, 23 bp, Artificial Sequence
  Description of Artificial Sequence: Synthetic oligonucleotide
tgtaaacaaaagcatctctcagg

SEQ ID NO: 666 - DNA, 23 bp, Artificial Sequence
  Description of Artificial Sequence: Synthetic oligonucleotide
tacatatccttctttgacatggg

SEQ ID NO: 667 - DNA, 23 bp, Artificial Sequence
  Description of Artificial Sequence: Synthetic oligonucleotide
gtacatatccttctttgacatgg

SEQ ID NO: 668 - DNA, 23 bp, Artificial Sequence
  Description of Artificial Sequence: Synthetic oligonucleotide
tcaattgcccatgtcaaagaagg

SEQ ID NO: 669 - DNA, 23 bp, Artificial Sequence
  Description of Artificial Sequence: Synthetic oligonucleotide
gagattttaacaatttttgcagg

SEQ ID NO: 670 - DNA, 23 bp, Artificial Sequence
  Description of Artificial Sequence: Synthetic oligonucleotide
agattttaacaatttttgcaggg

SEQ ID NO: 671 - DNA, 23 bp, Artificial Sequence
  Description of Artificial Sequence: Synthetic oligonucleotide
gattttaacaatttttgcagggg

SEQ ID NO: 672 - DNA, 23 bp, Artificial Sequence
  Description of Artificial Sequence: Synthetic oligonucleotide
ttttgcaggggaagctttcatgg

SEQ ID NO: 673 - DNA, 23 bp, Artificial Sequence
  Description of Artificial Sequence: Synthetic oligonucleotide
tttgcaggggaagctttcatggg

SEQ ID NO: 674 - DNA, 23 bp, Artificial Sequence
  Description of Artificial Sequence: Synthetic oligonucleotide
ttgcaggggaagctttcatgggg

SEQ ID NO: 675 - DNA, 23 bp, Artificial Sequence
  Description of Artificial Sequence: Synthetic oligonucleotide
tgcaggggaagctttcatggggg

SEQ ID NO: 676 - DNA, 23 bp, Artificial Sequence
  Description of Artificial Sequence: Synthetic oligonucleotide
gaagctttcatgggggctgatgg

SEQ ID NO: 677 - DNA, 23 bp, Artificial Sequence
  Description of Artificial Sequence: Synthetic oligonucleotide
aagctttcatgggggctgatggg

SEQ ID NO: 678 - DNA, 23 bp, Artificial Sequence
  Description of Artificial Sequence: Synthetic oligonucleotide
atgggggctgatgggaatctagg

SEQ ID NO: 679 - DNA, 23 bp, Artificial Sequence
  Description of Artificial Sequence: Synthetic oligonucleotide
gatatcttgggtttagactttgg

SEQ ID NO: 680 - DNA, 23 bp, Artificial Sequence
  Description of Artificial Sequence: Synthetic oligonucleotide
cttggtactggggatatcttggg

SEQ ID NO: 681 - DNA, 23 bp, Artificial Sequence
  Description of Artificial Sequence: Synthetic oligonucleotide
tcttggtactggggatatcttgg

SEQ ID NO: 682 - DNA, 23 bp, Artificial Sequence
  Description of Artificial Sequence: Synthetic oligonucleotide
tcatttcagtcttggtactgggg

SEQ ID NO: 683 - DNA, 23 bp, Artificial Sequence
  Description of Artificial Sequence: Synthetic oligonucleotide
gtcatttcagtcttggtactggg

SEQ ID NO: 684 - DNA, 23 bp, Artificial Sequence
  Description of Artificial Sequence: Synthetic oligonucleotide
agtcatttcagtcttggtactgg

SEQ ID NO: 685 - DNA, 23 bp, Artificial Sequence
  Description of Artificial Sequence: Synthetic oligonucleotide
ggagagagtcatttcagtcttgg

SEQ ID NO: 686 - DNA, 23 bp, Artificial Sequence
  Description of Artificial Sequence: Synthetic oligonucleotide
ctggaactttctagagatagagg

SEQ ID NO: 687 - DNA, 23 bp, Artificial Sequence
  Description of Artificial Sequence: Synthetic oligonucleotide
tgtttgcctccttgggtcactgg

SEQ ID NO: 688 - DNA, 23 bp, Artificial Sequence
  Description of Artificial Sequence: Synthetic oligonucleotide
tagaaagttccagtgacccaagg

SEQ ID NO: 689 - DNA, 23 bp, Artificial Sequence
  Description of Artificial Sequence: Synthetic oligonucleotide
aaagttccagtgacccaaggagg

SEQ ID NO: 690 - DNA, 23 bp, Artificial Sequence
  Description of Artificial Sequence: Synthetic oligonucleotide
cccatcgtgtttgcctccttggg

SEQ ID NO: 691 - DNA, 23 bp, Artificial Sequence
  Description of Artificial Sequence: Synthetic oligonucleotide
tcccatcgtgtttgcctccttgg

SEQ ID NO: 692 - DNA, 23 bp, Artificial Sequence
  Description of Artificial Sequence: Synthetic oligonucleotide
acccaaggaggcaaacacgatgg

SEQ ID NO: 693 - DNA, 23 bp, Artificial Sequence
  Description of Artificial Sequence: Synthetic oligonucleotide
cccaaggaggcaaacacgatggg

SEQ ID NO: 694 - DNA, 23 bp, Artificial Sequence
  Description of Artificial Sequence: Synthetic oligonucleotide
cacgatgggagtcattaaagtgg

SEQ ID NO: 695 - DNA, 23 bp, Artificial Sequence
  Description of Artificial Sequence: Synthetic oligonucleotide
acgatgggagtcattaaagtggg

SEQ ID NO: 696 - DNA, 23 bp, Artificial Sequence
  Description of Artificial Sequence: Synthetic oligonucleotide
cgatgggagtcattaaagtgggg

SEQ ID NO: 697 - DNA, 23 bp, Artificial Sequence
  Description of Artificial Sequence: Synthetic oligonucleotide
tgggagtcattaaagtggggtgg

SEQ ID NO: 698 - DNA, 23 bp, Artificial Sequence
  Description of Artificial Sequence: Synthetic oligonucleotide
aaaacaaaagcagcagaattagg

SEQ ID NO: 699 - DNA, 23 bp, Artificial Sequence
  Description of Artificial Sequence: Synthetic oligonucleotide
gtgagtatctgtaaccagccagg

SEQ ID NO: 700 - DNA, 23 bp, Artificial Sequence
  Description of Artificial Sequence: Synthetic oligonucleotide
atacagcttggtctcctggctgg

SEQ ID NO: 701 - DNA, 23 bp, Artificial Sequence
  Description of Artificial Sequence: Synthetic oligonucleotide
gtgcatacagcttggtctcctgg

SEQ ID NO: 702 - DNA, 23 bp, Artificial Sequence
  Description of Artificial Sequence: Synthetic oligonucleotide
cagccagcgtgcatacagcttgg

SEQ ID NO: 703 - DNA, 23 bp, Artificial Sequence
  Description of Artificial Sequence: Synthetic oligonucleotide
agaccaagctgtatgcacgctgg

SEQ ID NO: 704 - DNA, 23 bp, Artificial Sequence
  Description of Artificial Sequence: Synthetic oligonucleotide
cacgctggctgcagttccccagg

SEQ ID NO: 705 - DNA, 23 bp, Artificial Sequence
  Description of Artificial Sequence: Synthetic oligonucleotide
acgctggctgcagttccccaggg

SEQ ID NO: 706 - DNA, 23 bp, Artificial Sequence
  Description of Artificial Sequence: Synthetic oligonucleotide
gaaggctggcccaggccctgggg

SEQ ID NO: 707 - DNA, 23 bp, Artificial Sequence
  Description of Artificial Sequence: Synthetic oligonucleotide
ggctgcagttccccagggcctgg

SEQ ID NO: 708 - DNA, 23 bp, Artificial Sequence
  Description of Artificial Sequence: Synthetic oligonucleotide
agaaggctggcccaggccctggg

SEQ ID NO: 709 - DNA, 23 bp, Artificial Sequence
  Description of Artificial Sequence: Synthetic oligonucleotide
gctgcagttccccagggcctggg

SEQ ID NO: 710 - DNA, 23 bp, Artificial Sequence
  Description of Artificial Sequence: Synthetic oligonucleotide
tagaaggctggcccaggccctgg

SEQ ID NO: 711 - DNA, 23 bp, Artificial Sequence
  Description of Artificial Sequence: Synthetic oligonucleotide
accttctagaaggctggcccagg

SEQ ID NO: 712 - DNA, 23 bp, Artificial Sequence
  Description of Artificial Sequence: Synthetic oligonucleotide
aacctgaccttctagaaggctgg

SEQ ID NO: 713 - DNA, 23 bp, Artificial Sequence
  Description of Artificial Sequence: Synthetic oligonucleotide
gcctgggccagccttctagaagg

SEQ ID NO: 714 - DNA, 23 bp, Artificial Sequence
  Description of Artificial Sequence: Synthetic oligonucleotide
aggcaacctgaccttctagaagg

SEQ ID NO: 715 - DNA, 23 bp, Artificial Sequence
  Description of Artificial Sequence: Synthetic oligonucleotide
ggccagccttctagaaggtcagg

SEQ ID NO: 716 - DNA, 23 bp, Artificial Sequence
  Description of Artificial Sequence: Synthetic oligonucleotide
atgcatcttcatggctttttagg

SEQ ID NO: 717 - DNA, 23 bp, Artificial Sequence
  Description of Artificial Sequence: Synthetic oligonucleotide
tgttcgcacatgcatcttcatgg

SEQ ID NO: 718 - DNA, 23 bp, Artificial Sequence
  Description of Artificial Sequence: Synthetic oligonucleotide
gatgcatgtgcgaacatgtctgg

SEQ ID NO: 719 - DNA, 23 bp, Artificial Sequence
  Description of Artificial Sequence: Synthetic oligonucleotide
atgcatgtgcgaacatgtctggg

SEQ ID NO: 720 - DNA, 23 bp, Artificial Sequence
  Description of Artificial Sequence: Synthetic oligonucleotide
aatgccactccctagcacgcagg

SEQ ID NO: 721 - DNA, 23 bp, Artificial Sequence
  Description of Artificial Sequence: Synthetic oligonucleotide
atgtctgggacctgcgtgctagg

SEQ ID NO: 722 - DNA, 23 bp, Artificial Sequence
  Description of Artificial Sequence: Synthetic oligonucleotide
tgtctgggacctgcgtgctaggg

SEQ ID NO: 723 - DNA, 23 bp, Artificial Sequence
  Description of Artificial Sequence: Synthetic oligonucleotide
gggacctgcgtgctagggagtgg

SEQ ID NO: 724 - DNA, 23 bp, Artificial Sequence
  Description of Artificial Sequence: Synthetic oligonucleotide
tgctagggagtggcatttttagg

SEQ ID NO: 725 - DNA, 23 bp, Artificial Sequence
  Description of Artificial Sequence: Synthetic oligonucleotide
gagtggcatttttaggaagctgg

SEQ ID NO: 726 - DNA, 23 bp, Artificial Sequence
  Description of Artificial Sequence: Synthetic oligonucleotide
ttaaaaatgcaaaacaaaattgg

SEQ ID NO: 727 - DNA, 23 bp, Artificial Sequence
  Description of Artificial Sequence: Synthetic oligonucleotide
aattttgttttgcatttttaagg

SEQ ID NO: 728 - DNA, 23 bp, Artificial Sequence
  Description of Artificial Sequence: Synthetic oligonucleotide
ttaaggctgctgacaagacttgg

SEQ ID NO: 729 - DNA, 23 bp, Artificial Sequence
  Description of Artificial Sequence: Synthetic oligonucleotide
aagacttggagacatttttcagg

SEQ ID NO: 730 - DNA, 23 bp, Artificial Sequence
  Description of Artificial Sequence: Synthetic oligonucleotide
agacttggagacatttttcaggg

SEQ ID NO: 731 - DNA, 23 bp, Artificial Sequence
  Description of Artificial Sequence: Synthetic oligonucleotide
ttggagacatttttcagggctgg

SEQ ID NO: 732 - DNA, 23 bp, Artificial Sequence
  Description of Artificial Sequence: Synthetic oligonucleotide
gacatttttcagggctggtttgg

SEQ ID NO: 733 - DNA, 23 bp, Artificial Sequence
  Description of Artificial Sequence: Synthetic oligonucleotide
acatttttcagggctggtttggg

SEQ ID NO: 734 - DNA, 23 bp, Artificial Sequence
  Description of Artificial Sequence: Synthetic oligonucleotide
catatctgtattattttatgagg

SEQ ID NO: 735 - DNA, 23 bp, Artificial Sequence
  Description of Artificial Sequence: Synthetic oligonucleotide
aaaataatacagatatgcagtgg

SEQ ID NO: 736 - DNA, 23 bp, Artificial Sequence
  Description of Artificial Sequence: Synthetic oligonucleotide
tttccagagtcacatgctggtgg

SEQ ID NO: 737 - DNA, 23 bp, Artificial Sequence
  Description of Artificial Sequence: Synthetic oligonucleotide
tcttttccagagtcacatgctgg

SEQ ID NO: 738 - DNA, 23 bp, Artificial Sequence
  Description of Artificial Sequence: Synthetic oligonucleotide
aagccaccagcatgtgactctgg

SEQ ID NO: 739 - DNA, 23 bp, Artificial Sequence
  Description of Artificial Sequence: Synthetic oligonucleotide
ctctggaaaagaaagcccattgg

SEQ ID NO: 740 - DNA, 23 bp, Artificial Sequence
  Description of Artificial Sequence: Synthetic oligonucleotide
tttagtacagattcaccaatggg

SEQ ID NO: 741 - DNA, 23 bp, Artificial Sequence
  Description of Artificial Sequence: Synthetic oligonucleotide
ctttagtacagattcaccaatgg

SEQ ID NO: 742 - DNA, 23 bp, Artificial Sequence
  Description of Artificial Sequence: Synthetic oligonucleotide
ttaggactgtaagatagggatgg

SEQ ID NO: 743 - DNA, 23 bp, Artificial Sequence
  Description of Artificial Sequence: Synthetic oligonucleotide
taccttaggactgtaagataggg

SEQ ID NO: 744 - DNA, 23 bp, Artificial Sequence
  Description of Artificial Sequence: Synthetic oligonucleotide
ttaccttaggactgtaagatagg

SEQ ID NO: 745 - DNA, 23 bp, Artificial Sequence
  Description of Artificial Sequence: Synthetic oligonucleotide
atccctatcttacagtcctaagg

SEQ ID NO: 746 - DNA, 23 bp, Artificial Sequence
  Description of Artificial Sequence: Synthetic oligonucleotide
ctttttggggtgtttaccttagg

SEQ ID NO: 747 - DNA, 23 bp, Artificial Sequence
  Description of Artificial Sequence: Synthetic oligonucleotide
tagtgctctaagtctttttgggg

SEQ ID NO: 748 - DNA, 23 bp, Artificial Sequence
  Description of Artificial Sequence: Synthetic oligonucleotide
ttagtgctctaagtctttttggg

SEQ ID NO: 749 - DNA, 23 bp, Artificial Sequence
  Description of Artificial Sequence: Synthetic oligonucleotide
tttagtgctctaagtctttttgg

SEQ ID NO: 750 - DNA, 23 bp, Artificial Sequence
  Description of Artificial Sequence: Synthetic oligonucleotide
gtagagctagggtttgaatgagg

SEQ ID NO: 751 - DNA, 23 bp, Artificial Sequence
  Description of Artificial Sequence: Synthetic oligonucleotide
gactggcccaggtagagctaggg

SEQ ID NO: 752 - DNA, 23 bp, Artificial Sequence
  Description of Artificial Sequence: Synthetic oligonucleotide
cgactggcccaggtagagctagg

SEQ ID NO: 753 - DNA, 23 bp, Artificial Sequence
  Description of Artificial Sequence: Synthetic oligonucleotide
attcaaaccctagctctacctgg

SEQ ID NO: 754 - DNA, 23 bp, Artificial Sequence
  Description of Artificial Sequence: Synthetic oligonucleotide
ttcaaaccctagctctacctggg

SEQ ID NO: 755 - DNA, 23 bp, Artificial Sequence
  Description of Artificial Sequence: Synthetic oligonucleotide
aaagatgaatcgactggcccagg

SEQ ID NO: 756 - DNA, 23 bp, Artificial Sequence
  Description of Artificial Sequence: Synthetic oligonucleotide
ggttctaaagatgaatcgactgg

SEQ ID NO: 757 - DNA, 23 bp, Artificial Sequence
  Description of Artificial Sequence: Synthetic oligonucleotide
ttttcaggtaaagcaatggaggg

SEQ ID NO: 758 - DNA, 23 bp, Artificial Sequence
  Description of Artificial Sequence: Synthetic oligonucleotide
cttttcaggtaaagcaatggagg

SEQ ID NO: 759 - DNA, 23 bp, Artificial Sequence
  Description of Artificial Sequence: Synthetic oligonucleotide
gaacttttcaggtaaagcaatgg

SEQ ID NO: 760 - DNA, 23 bp, Artificial Sequence
  Description of Artificial Sequence: Synthetic oligonucleotide
ttttgttatacgaacttttcagg

SEQ ID NO: 761 - DNA, 23 bp, Artificial Sequence
  Description of Artificial Sequence: Synthetic oligonucleotide
tgaaaagttcgtataacaaaagg

SEQ ID NO: 762 - DNA, 23 bp, Artificial Sequence
  Description of Artificial Sequence: Synthetic oligonucleotide
taacaaaaggacccaccttatgg

SEQ ID NO: 763 - DNA, 23 bp, Artificial Sequence
  Description of Artificial Sequence: Synthetic oligonucleotide
ttgtaacaaccccataaggtggg

SEQ ID NO: 764 - DNA, 23 bp, Artificial Sequence
  Description of Artificial Sequence: Synthetic oligonucleotide
aacaaaaggacccaccttatggg

SEQ ID NO: 765 - DNA, 23 bp, Artificial Sequence
  Description of Artificial Sequence: Synthetic oligonucleotide
cttgtaacaaccccataaggtgg

SEQ ID NO: 766 - DNA, 23 bp, Artificial Sequence
  Description of Artificial Sequence: Synthetic oligonucleotide
acaaaaggacccaccttatgggg

SEQ ID NO: 767 - DNA, 23 bp, Artificial Sequence
  Description of Artificial Sequence: Synthetic oligonucleotide
atccttgtaacaaccccataagg

SEQ ID NO: 768 - DNA, 23 bp, Artificial Sequence
  Description of Artificial Sequence: Synthetic oligonucleotide
caccttatggggttgttacaagg

SEQ ID NO: 769 - DNA, 23 bp, Artificial Sequence
  Description of Artificial Sequence: Synthetic oligonucleotide
tgtacataagagactgaatatgg

SEQ ID NO: 770 - DNA, 23 bp, Artificial Sequence
  Description of Artificial Sequence: Synthetic oligonucleotide
attgagcactgatatatgctggg

SEQ ID NO: 771 - DNA, 23 bp, Artificial Sequence
  Description of Artificial Sequence: Synthetic oligonucleotide
tattgagcactgatatatgctgg

SEQ ID NO: 772 - DNA, 23 bp, Artificial Sequence
  Description of Artificial Sequence: Synthetic oligonucleotide
ggtctagatttgcaaatctaggg

SEQ ID NO: 773 - DNA, 23 bp, Artificial Sequence
  Description of Artificial Sequence: Synthetic oligonucleotide
tggtctagatttgcaaatctagg

SEQ ID NO: 774 - DNA, 23 bp, Artificial Sequence
  Description of Artificial Sequence: Synthetic oligonucleotide
cactcttacttctgcttgtgtgg

SEQ ID NO: 775 - DNA, 23 bp, Artificial Sequence
  Description of Artificial Sequence: Synthetic oligonucleotide
agcagaagtaagagtgccaacgg

SEQ ID NO: 776 - DNA, 23 bp, Artificial Sequence
  Description of Artificial Sequence: Synthetic oligonucleotide
gcagaagtaagagtgccaacggg

SEQ ID NO: 777 - DNA, 23 bp, Artificial Sequence
  Description of Artificial Sequence: Synthetic oligonucleotide
cagaagtaagagtgccaacgggg

SEQ ID NO: 778 - DNA, 23 bp, Artificial Sequence
  Description of Artificial Sequence: Synthetic oligonucleotide
cacactggtccacaccccgttgg

SEQ ID NO: 779 - DNA, 23 bp, Artificial Sequence
  Description of Artificial Sequence: Synthetic oligonucleotide
gtaagagtgccaacggggtgtgg

SEQ ID NO: 780 - DNA, 23 bp, Artificial Sequence
  Description of Artificial Sequence: Synthetic oligonucleotide
caacggggtgtggaccagtgtgg

SEQ ID NO: 781 - DNA, 23 bp, Artificial Sequence
  Description of Artificial Sequence: Synthetic oligonucleotide
aagccctattgtaaccacactgg

SEQ ID NO: 782 - DNA, 23 bp, Artificial Sequence
  Description of Artificial Sequence: Synthetic oligonucleotide
tggaccagtgtggttacaatagg

SEQ ID NO: 783 - DNA, 23 bp, Artificial Sequence
  Description of Artificial Sequence: Synthetic oligonucleotide
ggaccagtgtggttacaataggg

SEQ ID NO: 784 - DNA, 23 bp, Artificial Sequence
  Description of Artificial Sequence: Synthetic oligonucleotide
tgttgatgtctgtttcagcaagg

SEQ ID NO: 785 - DNA, 23 bp, Artificial Sequence
  Description of Artificial Sequence: Synthetic oligonucleotide
tgatgtctgtttcagcaaggagg

SEQ ID NO: 786 - DNA, 23 bp, Artificial Sequence
  Description of Artificial Sequence: Synthetic oligonucleotide
gatgtctgtttcagcaaggaggg

SEQ ID NO: 787 - DNA, 23 bp, Artificial Sequence
  Description of Artificial Sequence: Synthetic oligonucleotide
gtctgtttcagcaaggagggagg

SEQ ID NO: 788 - DNA, 23 bp, Artificial Sequence
  Description of Artificial Sequence: Synthetic oligonucleotide
caccagggagctgggcagtgggg

SEQ ID NO: 789 - DNA, 23 bp, Artificial Sequence
  Description of Artificial Sequence: Synthetic oligonucleotide
ccaccagggagctgggcagtggg

SEQ ID NO: 790 - DNA, 23 bp, Artificial Sequence
  Description of Artificial Sequence: Synthetic oligonucleotide
tccaccagggagctgggcagtgg

SEQ ID NO: 791 - DNA, 23 bp, Artificial Sequence
  Description of Artificial Sequence: Synthetic oligonucleotide
cctgattccaccagggagctggg

SEQ ID NO: 792 - DNA, 23 bp, Artificial Sequence
  Description of Artificial Sequence: Synthetic oligonucleotide
taccccactgcccagctccctgg

SEQ ID NO: 793 - DNA, 23 bp, Artificial Sequence
  Description of Artificial Sequence: Synthetic oligonucleotide
acctgattccaccagggagctgg

SEQ ID NO: 794 - DNA, 23 bp, Artificial Sequence
  Description of Artificial Sequence: Synthetic oligonucleotide
cccactgcccagctccctggtgg

SEQ ID NO: 795 - DNA, 23 bp, Artificial Sequence
  Description of Artificial Sequence: Synthetic oligonucleotide
acatgcacctgattccaccaggg

SEQ ID NO: 796 - DNA, 23 bp, Artificial Sequence
  Description of Artificial Sequence: Synthetic oligonucleotide
aacatgcacctgattccaccagg

SEQ ID NO: 797 - DNA, 23 bp, Artificial Sequence
  Description of Artificial Sequence: Synthetic oligonucleotide
cccagctccctggtggaatcagg

SEQ ID NO: 798 - DNA, 23 bp, Artificial Sequence
  Description of Artificial Sequence: Synthetic oligonucleotide
ggtgcatgttctaacaattctgg

SEQ ID NO: 799 - DNA, 23 bp, Artificial Sequence
  Description of Artificial Sequence: Synthetic oligonucleotide
gtgcatgttctaacaattctggg

SEQ ID NO: 800 - DNA, 23 bp, Artificial Sequence
  Description of Artificial Sequence: Synthetic oligonucleotide
tgcatgttctaacaattctgggg

SEQ ID NO: 801 - DNA, 23 bp, Artificial Sequence
  Description of Artificial Sequence: Synthetic oligonucleotide
tgacagtgccaaaacagattagg

SEQ ID NO: 802 - DNA, 23 bp, Artificial Sequence
  Description of Artificial Sequence: Synthetic oligonucleotide
tggggaaacctaatctgttttgg

SEQ ID NO: 803 - DNA, 23 bp, Artificial Sequence
  Description of Artificial Sequence: Synthetic oligonucleotide
ctgtcaacagatctcaaagctgg

SEQ ID NO: 804 - DNA, 23 bp, Artificial Sequence
  Description of Artificial Sequence: Synthetic oligonucleotide
gctggctgtctcctatagctagg

SEQ ID NO: 805 - DNA, 23 bp, Artificial Sequence
  Description of Artificial Sequence: Synthetic oligonucleotide
atacacatcttcctagctatagg

SEQ ID NO: 806 - DNA, 23 bp, Artificial Sequence
  Description of Artificial Sequence: Synthetic oligonucleotide
caggccttcacaagtggctcagg

SEQ ID NO: 807 - DNA, 23 bp, Artificial Sequence
  Description of Artificial Sequence: Synthetic oligonucleotide
gaaggtcaggccttcacaagtgg

SEQ ID NO: 808 - DNA, 23 bp, Artificial Sequence
  Description of Artificial Sequence: Synthetic oligonucleotide
atctcctgagccacttgtgaagg

SEQ ID NO: 809 - DNA, 23 bp, Artificial Sequence
  Description of Artificial Sequence: Synthetic oligonucleotide
atggagacaggaggaaggtcagg

SEQ ID NO: 810 - DNA, 23 bp, Artificial Sequence
  Description of Artificial Sequence: Synthetic oligonucleotide
tatgtatggagacaggaggaagg

SEQ ID NO: 811 - DNA, 23 bp, Artificial Sequence
  Description of Artificial Sequence: Synthetic oligonucleotide
ccattatgtatggagacaggagg

SEQ ID NO: 812 - DNA, 23 bp, Artificial Sequence
  Description of Artificial Sequence: Synthetic oligonucleotide
atcccattatgtatggagacagg

SEQ ID NO: 813 - DNA, 23 bp, Artificial Sequence
  Description of Artificial Sequence: Synthetic oligonucleotide
cttaatcatcccattatgtatgg

SEQ ID NO: 814 - DNA, 23 bp, Artificial Sequence
  Description of Artificial Sequence: Synthetic oligonucleotide
cctcctgtctccatacataatgg

SEQ ID NO: 815 - DNA, 23 bp, Artificial Sequence
  Description of Artificial Sequence: Synthetic oligonucleotide
ctcctgtctccatacataatggg

SEQ ID NO: 816 - DNA, 23 bp, Artificial Sequence
  Description of Artificial Sequence: Synthetic oligonucleotide
ttgaaaagtgcttaagagagtgg

SEQ ID NO: 817 - DNA, 23 bp, Artificial Sequence
  Description of Artificial Sequence: Synthetic oligonucleotide
cttaagcacttttcaatgttagg

SEQ ID NO: 818 - DNA, 23 bp, Artificial Sequence
  Description of Artificial Sequence: Synthetic oligonucleotide
ttaagcacttttcaatgttaggg

SEQ ID NO: 819 - DNA, 23 bp, Artificial Sequence
  Description of Artificial Sequence: Synthetic oligonucleotide
tcagttggctattaaattggagg

SEQ ID NO: 820 - DNA, 23 bp, Artificial Sequence
  Description of Artificial Sequence: Synthetic oligonucleotide
ctttcagttggctattaaattgg

SEQ ID NO: 821 - DNA, 23 bp, Artificial Sequence
  Description of Artificial Sequence: Synthetic oligonucleotide
gcattttctcttctttcagttgg

SEQ ID NO: 822 - DNA, 23 bp, Artificial Sequence
  Description of Artificial Sequence: Synthetic oligonucleotide
ttatttccacatacagtttaagg

SEQ ID NO: 823 - DNA, 23 bp, Artificial Sequence
  Description of Artificial Sequence: Synthetic oligonucleotide
ctctttccttaaactgtatgtgg

SEQ ID NO: 824 - DNA, 23 bp, Artificial Sequence
  Description of Artificial Sequence: Synthetic oligonucleotide
acataatcagggtcacacattgg

SEQ ID NO: 825 - DNA, 23 bp, Artificial Sequence
  Description of Artificial Sequence: Synthetic oligonucleotide
ctaattgcctaacataatcaggg

SEQ ID NO: 826 - DNA, 23 bp, Artificial Sequence
  Description of Artificial Sequence: Synthetic oligonucleotide
gctaattgcctaacataatcagg

SEQ ID NO: 827 - DNA, 23 bp, Artificial Sequence
  Description of Artificial Sequence: Synthetic oligonucleotide
tgtgtgaccctgattatgttagg

SEQ ID NO: 828 - DNA, 23 bp, Artificial Sequence
  Description of Artificial Sequence: Synthetic oligonucleotide
aacttccctcaattcatattagg

SEQ ID NO: 829 - DNA, 23 bp, Artificial Sequence
  Description of Artificial Sequence: Synthetic oligonucleotide
agcaatcctaatatgaattgagg

SEQ ID NO: 830 - DNA, 23 bp, Artificial Sequence
  Description of Artificial Sequence: Synthetic oligonucleotide
gcaatcctaatatgaattgaggg

SEQ ID NO: 831 - DNA, 23 bp, Artificial Sequence
  Description of Artificial Sequence: Synthetic oligonucleotide
taatatgaattgagggaagttgg

SEQ ID NO: 832 - DNA, 23 bp, Artificial Sequence
  Description of Artificial Sequence: Synthetic oligonucleotide
aatatgaattgagggaagttggg

SEQ ID NO: 833 - DNA, 23 bp, Artificial Sequence
  Description of Artificial Sequence: Synthetic oligonucleotide
ttgagggaagttgggattcatgg

SEQ ID NO: 834 - DNA, 23 bp, Artificial Sequence
  Description of Artificial Sequence: Synthetic oligonucleotide
gttgggattcatggcacagctgg

SEQ ID NO: 835 - DNA, 23 bp, Artificial Sequence
  Description of Artificial Sequence: Synthetic oligonucleotide
ttgggattcatggcacagctggg

SEQ ID NO: 836 - DNA, 23 bp, Artificial Sequence
  Description of Artificial Sequence: Synthetic oligonucleotide
tgggattcatggcacagctgggg

SEQ ID NO: 837 - DNA, 23 bp, Artificial Sequence
  Description of Artificial Sequence: Synthetic oligonucleotide
gacaggctcccagggactgctgg

SEQ ID NO: 838 - DNA, 23 bp, Artificial Sequence
  Description of Artificial Sequence: Synthetic oligonucleotide
ggggagataccagcagtccctgg

SEQ ID NO: 839 - DNA, 23 bp, Artificial Sequence
  Description of Artificial Sequence: Synthetic oligonucleotide
gggagataccagcagtccctggg

SEQ ID NO: 840 - DNA, 23 bp, Artificial Sequence
  Description of Artificial Sequence: Synthetic oligonucleotide
ctgccctggacaggctcccaggg

SEQ ID NO: 841 - DNA, 23 bp, Artificial Sequence
  Description of Artificial Sequence: Synthetic oligonucleotide
cctgccctggacaggctcccagg

SEQ ID NO: 842 - DNA, 23 bp, Artificial Sequence
  Description of Artificial Sequence: Synthetic oligonucleotide
cagtccctgggagcctgtccagg

SEQ ID NO: 843 - DNA, 23 bp, Artificial Sequence
  Description of Artificial Sequence: Synthetic oligonucleotide
agtccctgggagcctgtccaggg

SEQ ID NO: 844 - DNA, 23 bp, Artificial Sequence
  Description of Artificial Sequence: Synthetic oligonucleotide
gccatggacctgccctggacagg

SEQ ID NO: 845 - DNA, 23 bp, Artificial Sequence
  Description of Artificial Sequence: Synthetic oligonucleotide
cctgggagcctgtccagggcagg

SEQ ID NO: 846 - DNA, 23 bp, Artificial Sequence
  Description of Artificial Sequence: Synthetic oligonucleotide
aagctgccatggacctgccctgg

SEQ ID NO: 847 - DNA, 23 bp, Artificial Sequence
  Description of Artificial Sequence: Synthetic oligonucleotide
gcctgtccagggcaggtccatgg

SEQ ID NO: 848 - DNA, 23 bp, Artificial Sequence
  Description of Artificial Sequence: Synthetic oligonucleotide
aggcatggagcaagctgccatgg

SEQ ID NO: 849 - DNA, 23 bp, Artificial Sequence
  Description of Artificial Sequence: Synthetic oligonucleotide
gctgggctgtcaatcaggcatgg

SEQ ID NO: 850 - DNA, 23 bp, Artificial Sequence
  Description of Artificial Sequence: Synthetic oligonucleotide
tgcaggctgggctgtcaatcagg

SEQ ID NO: 851 - DNA, 23 bp, Artificial Sequence
  Description of Artificial Sequence: Synthetic oligonucleotide
caacttttagcttgcaggctggg

SEQ ID NO: 852 - DNA, 23 bp, Artificial Sequence
  Description of Artificial Sequence: Synthetic oligonucleotide
tcaacttttagcttgcaggctgg

SEQ ID NO: 853 - DNA, 23 bp, Artificial Sequence
  Description of Artificial Sequence: Synthetic oligonucleotide
tcactcaacttttagcttgcagg

SEQ ID NO: 854 - DNA, 23 bp, Artificial Sequence
  Description of Artificial Sequence: Synthetic oligonucleotide
agctaaaagttgagtgagctagg

SEQ ID NO: 855 - DNA, 23 bp, Artificial Sequence
  Description of Artificial Sequence: Synthetic oligonucleotide
taaaagttgagtgagctaggagg

SEQ ID NO: 856 - DNA, 23 bp, Artificial Sequence
  Description of Artificial Sequence: Synthetic oligonucleotide
ggtgtctgttagctgaatcttgg

SEQ ID NO: 857 - DNA, 23 bp, Artificial Sequence
  Description of Artificial Sequence: Synthetic oligonucleotide
atagcagcaagaatatcgctggg

SEQ ID NO: 858 - DNA, 23 bp, Artificial Sequence
  Description of Artificial Sequence: Synthetic oligonucleotide
catagcagcaagaatatcgctgg

SEQ ID NO: 859 - DNA, 23 bp, Artificial Sequence
  Description of Artificial Sequence: Synthetic oligonucleotide
ttcttgctgctatgaacaaaagg

SEQ ID NO: 860 - DNA, 23 bp, Artificial Sequence
  Description of Artificial Sequence: Synthetic oligonucleotide
aggcatcctggaagaatgggtgg

SEQ ID NO: 861 - DNA, 23 bp, Artificial Sequence
  Description of Artificial Sequence: Synthetic oligonucleotide
gtcaggcatcctggaagaatggg

SEQ ID NO: 862 - DNA, 23 bp, Artificial Sequence
  Description of Artificial Sequence: Synthetic oligonucleotide
agtcaggcatcctggaagaatgg

SEQ ID NO: 863 - DNA, 23 bp, Artificial Sequence
  Description of Artificial Sequence: Synthetic oligonucleotide
tatacaccacccattcttccagg

SEQ ID NO: 864 - DNA, 23 bp, Artificial Sequence
  Description of Artificial Sequence: Synthetic oligonucleotide
attttttaagtcaggcatcctgg

SEQ ID NO: 865 - DNA, 23 bp, Artificial Sequence
  Description of Artificial Sequence: Synthetic oligonucleotide
tttttcttattttttaagtcagg

SEQ ID NO: 866 - DNA, 23 bp, Artificial Sequence
  Description of Artificial Sequence: Synthetic oligonucleotide
ttaaaaaataagaaaaaagatgg

SEQ ID NO: 867 - DNA, 23 bp, Artificial Sequence
  Description of Artificial Sequence: Synthetic oligonucleotide
taaaaaataagaaaaaagatggg

SEQ ID NO: 868 - DNA, 23 bp, Artificial Sequence
  Description of Artificial Sequence: Synthetic oligonucleotide
aaataagaaaaaagatgggccgg

SEQ ID NO: 869 - DNA, 23 bp, Artificial Sequence
  Description of Artificial Sequence: Synthetic oligonucleotide
aataagaaaaaagatgggccggg

SEQ ID NO: 870 - DNA, 23 bp, Artificial Sequence
  Description of Artificial Sequence: Synthetic oligonucleotide
caggcgtgagccactgtgcccgg

SEQ ID NO: 871 - DNA, 23 bp, Artificial Sequence
  Description of Artificial Sequence: Synthetic oligonucleotide
aaaagatgggccgggcacagtgg

SEQ ID NO: 872 - DNA, 23 bp, Artificial Sequence
  Description of Artificial Sequence: Synthetic oligonucleotide
tcccaaagtgttgggattacagg

SEQ ID NO: 873 - DNA, 23 bp, Artificial Sequence
  Description of Artificial Sequence: Synthetic oligonucleotide
cctcggcctcccaaagtgttggg

SEQ ID NO: 874 - DNA, 23 bp, Artificial Sequence
  Description of Artificial Sequence: Synthetic oligonucleotide
cgcctgtaatcccaacactttgg

SEQ ID NO: 875 - DNA, 23 bp, Artificial Sequence
  Description of Artificial Sequence: Synthetic oligonucleotide
acctcggcctcccaaagtgttgg

SEQ ID NO: 876 - DNA, 23 bp, Artificial Sequence
  Description of Artificial Sequence: Synthetic oligonucleotide
gcctgtaatcccaacactttggg

SEQ ID NO: 877 - DNA, 23 bp, Artificial Sequence
  Description of Artificial Sequence: Synthetic oligonucleotide
tgtaatcccaacactttgggagg

SEQ ID NO: 878 - DNA, 23 bp, Artificial Sequence
  Description of Artificial Sequence: Synthetic oligonucleotide
cccaacactttgggaggccgagg

SEQ ID NO: 879 - DNA, 23 bp, Artificial Sequence
  Description of Artificial Sequence: Synthetic oligonucleotide
aacactttgggaggccgaggtgg

SEQ ID NO: 880 - DNA, 23 bp, Artificial Sequence
  Description of Artificial Sequence: Synthetic oligonucleotide
acactttgggaggccgaggtggg

SEQ ID NO: 881 - DNA, 23 bp, Artificial Sequence
  Description of Artificial Sequence: Synthetic oligonucleotide
accttgtgatccgcccacctcgg

SEQ ID NO: 882 - DNA, 23 bp, Artificial Sequence
  Description of Artificial Sequence: Synthetic oligonucleotide
ctttgggaggccgaggtgggcgg

SEQ ID NO: 883 - DNA, 23 bp, Artificial Sequence
  Description of Artificial Sequence: Synthetic oligonucleotide
gccgaggtgggcggatcacaagg

SEQ ID NO: 884 - DNA, 23 bp, Artificial Sequence
  Description of Artificial Sequence: Synthetic oligonucleotide
ggtgggcggatcacaaggtcagg

SEQ ID NO: 885 - DNA, 23 bp, Artificial Sequence
  Description of Artificial Sequence: Synthetic oligonucleotide
tcaggagacagagaccatcctgg

SEQ ID NO: 886 - DNA, 23 bp, Artificial Sequence
  Description of Artificial Sequence: Synthetic oligonucleotide
tttcaccatgttagccaggatgg

SEQ ID NO: 887 - DNA, 23 bp, Artificial Sequence
  Description of Artificial Sequence: Synthetic oligonucleotide
ggggtttcaccatgttagccagg

SEQ ID NO: 888 - DNA, 23 bp, Artificial Sequence
  Description of Artificial Sequence: Synthetic oligonucleotide
agagaccatcctggctaacatgg

SEQ ID NO: 889 - DNA, 23 bp, Artificial Sequence
  Description of Artificial Sequence: Synthetic oligonucleotide
gtatttttttagtagagacgggg

SEQ ID NO: 890 - DNA, 23 bp, Artificial Sequence
  Description of Artificial Sequence: Synthetic oligonucleotide
tgtatttttttagtagagacggg

SEQ ID NO: 891 - DNA, 23 bp, Artificial Sequence
  Description of Artificial Sequence: Synthetic oligonucleotide
ttgtatttttttagtagagacgg

SEQ ID NO: 892 - DNA, 23 bp, Artificial Sequence
  Description of Artificial Sequence: Synthetic oligonucleotide
aaaaaatacaaaaatattagcgg

SEQ ID NO: 893 - DNA, 23 bp, Artificial Sequence
  Description of Artificial Sequence: Synthetic oligonucleotide
aaaaatacaaaaatattagcggg

SEQ ID NO: 894 - DNA, 23 bp, Artificial Sequence
  Description of Artificial Sequence: Synthetic oligonucleotide
tacaaaaatattagcgggcgtgg

SEQ ID NO: 895 - DNA, 23 bp, Artificial Sequence
  Description of Artificial Sequence: Synthetic oligonucleotide
aaaaatattagcgggcgtggtgg

SEQ ID NO: 896 - DNA, 23 bp, Artificial Sequence
  Description of Artificial Sequence: Synthetic oligonucleotide
aatattagcgggcgtggtggcgg

SEQ ID NO: 897 - DNA, 23 bp, Artificial Sequence
  Description of Artificial Sequence: Synthetic oligonucleotide
atattagcgggcgtggtggcggg

SEQ ID NO: 898 - DNA, 23 bp, Artificial Sequence
  Description of Artificial Sequence: Synthetic oligonucleotide
tcccgagtagctgggactacagg

SEQ ID NO: 899 - DNA, 23 bp, Artificial Sequence
  Description of Artificial Sequence: Synthetic oligonucleotide
cctcagcctcccgagtagctggg

SEQ ID NO: 900 - DNA, 23 bp, Artificial Sequence
  Description of Artificial Sequence: Synthetic oligonucleotide
cacctgtagtcccagctactcgg

SEQ ID NO: 901 - DNA, 23 bp, Artificial Sequence
  Description of Artificial Sequence: Synthetic oligonucleotide
gcctcagcctcccgagtagctgg

SEQ ID NO: 902 - DNA, 23 bp, Artificial Sequence
  Description of Artificial Sequence: Synthetic oligonucleotide
acctgtagtcccagctactcggg

SEQ ID NO: 903 - DNA, 23 bp, Artificial Sequence
  Description of Artificial Sequence: Synthetic oligonucleotide
tgtagtcccagctactcgggagg

SEQ ID NO: 904 - DNA, 23 bp, Artificial Sequence
  Description of Artificial Sequence: Synthetic oligonucleotide
cccagctactcgggaggctgagg

SEQ ID NO: 905 - DNA, 23 bp, Artificial Sequence
  Description of Artificial Sequence: Synthetic oligonucleotide
gctactcgggaggctgaggcagg

SEQ ID NO: 906 - DNA, 23 bp, Artificial Sequence
  Description of Artificial Sequence: Synthetic oligonucleotide
gggaggctgaggcaggagaatgg

SEQ ID NO: 907 - DNA, 23 bp, Artificial Sequence
  Description of Artificial Sequence: Synthetic oligonucleotide
gcaggagaatggcgtgaacctgg

SEQ ID NO: 908 - DNA, 23 bp, Artificial Sequence
  Description of Artificial Sequence: Synthetic oligonucleotide
caggagaatggcgtgaacctggg

SEQ ID NO: 909 - DNA, 23 bp, Artificial Sequence
  Description of Artificial Sequence: Synthetic oligonucleotide
gagaatggcgtgaacctgggagg

SEQ ID NO: 910 - DNA, 23 bp, Artificial Sequence
  Description of Artificial Sequence: Synthetic oligonucleotide
aatggcgtgaacctgggaggcgg

SEQ ID NO: 911 - DNA, 23 bp, Artificial Sequence
  Description of Artificial Sequence: Synthetic oligonucleotide
cactgcaagctccgcctcccagg

SEQ ID NO: 912 - DNA, 23 bp, Artificial Sequence
  Description of Artificial Sequence: Synthetic oligonucleotide
ggactgcagtggcacgatcttgg

SEQ ID NO: 913 - DNA, 23 bp, Artificial Sequence
  Description of Artificial Sequence: Synthetic oligonucleotide
tcacccaggctggactgcagtgg

SEQ ID NO: 914 - DNA, 23 bp, Artificial Sequence
  Description of Artificial Sequence: Synthetic oligonucleotide
cgtgccactgcagtccagcctgg

SEQ ID NO: 915 - DNA, 23 bp, Artificial Sequence
  Description of Artificial Sequence: Synthetic oligonucleotide
gtgccactgcagtccagcctggg

SEQ ID NO: 916 - DNA, 23 bp, Artificial Sequence
  Description of Artificial Sequence: Synthetic oligonucleotide
tctcactctgtcacccaggctgg

SEQ ID NO: 917 - DNA, 23 bp, Artificial Sequence
  Description of Artificial Sequence: Synthetic oligonucleotide
ggtgtctcactctgtcacccagg

SEQ ID NO: 918 - DNA, 23 bp, Artificial Sequence
  Description of Artificial Sequence: Synthetic oligonucleotide
ttttttttttttttttgagacgg

SEQ ID NO: 919 - DNA, 23 bp, Artificial Sequence
  Description of Artificial Sequence: Synthetic oligonucleotide
aaaaaatcaatcagtactaaagg

SEQ ID NO: 920 - DNA, 23 bp, Artificial Sequence
  Description of Artificial Sequence: Synthetic oligonucleotide
agtagataatatacacacatggg

SEQ ID NO: 921 - DNA, 23 bp, Artificial Sequence
  Description of Artificial Sequence: Synthetic oligonucleotide
gagtagataatatacacacatgg

SEQ ID NO: 922 - DNA, 23 bp, Artificial Sequence
  Description of Artificial Sequence: Synthetic oligonucleotide
acttaattaaacacaaagccagg

SEQ ID NO: 923 - DNA, 23 bp, Artificial Sequence
  Description of Artificial Sequence: Synthetic oligonucleotide
agaagcaattaggtgaggcctgg

SEQ ID NO: 924 - DNA, 23 bp, Artificial Sequence
  Description of Artificial Sequence: Synthetic oligonucleotide
ttccaagaagcaattaggtgagg

SEQ ID NO: 925 - DNA, 23 bp, Artificial Sequence
  Description of Artificial Sequence: Synthetic oligonucleotide
tcaccttccaagaagcaattagg

SEQ ID NO: 926 - DNA, 23 bp, Artificial Sequence
  Description of Artificial Sequence: Synthetic oligonucleotide
ggcctcacctaattgcttcttgg

SEQ ID NO: 927 - DNA, 23 bp, Artificial Sequence
  Description of Artificial Sequence: Synthetic oligonucleotide
tcacctaattgcttcttggaagg

SEQ ID NO: 928 - DNA, 23 bp, Artificial Sequence
  Description of Artificial Sequence: Synthetic oligonucleotide
tttgcttggcactagcactctgg

SEQ ID NO: 929 - DNA, 23 bp, Artificial Sequence
  Description of Artificial Sequence: Synthetic oligonucleotide
atatagaagagttgtttgcttgg

SEQ ID NO: 930 - DNA, 23 bp, Artificial Sequence
  Description of Artificial Sequence: Synthetic oligonucleotide
cttctatatctcaagagccctgg

SEQ ID NO: 931 - DNA, 23 bp, Artificial Sequence
  Description of Artificial Sequence: Synthetic oligonucleotide
ttctatatctcaagagccctggg

SEQ ID NO: 932 - DNA, 23 bp, Artificial Sequence
  Description of Artificial Sequence: Synthetic oligonucleotide
agatggccctctgaagcccaggg

SEQ ID NO: 933 - DNA, 23 bp, Artificial Sequence
  Description of Artificial Sequence: Synthetic oligonucleotide
aagatggccctctgaagcccagg

SEQ ID NO: 934 - DNA, 23 bp, Artificial Sequence
  Description of Artificial Sequence: Synthetic oligonucleotide
tcaagagccctgggcttcagagg

SEQ ID NO: 935 - DNA, 23 bp, Artificial Sequence
  Description of Artificial Sequence: Synthetic oligonucleotide
caagagccctgggcttcagaggg

SEQ ID NO: 936 - DNA, 23 bp, Artificial Sequence
  Description of Artificial Sequence: Synthetic oligonucleotide
acttgaattaacaaaaaagatgg

SEQ ID NO: 937 - DNA, 23 bp, Artificial Sequence
  Description of Artificial Sequence: Synthetic oligonucleotide
aattcaagtttctctgaaaatgg

SEQ ID NO: 938 - DNA, 23 bp, Artificial Sequence
  Description of Artificial Sequence: Synthetic oligonucleotide
gccagcttgtcatcataaacggg

SEQ ID NO: 939 - DNA, 23 bp, Artificial Sequence
  Description of Artificial Sequence: Synthetic oligonucleotide
agccagcttgtcatcataaacgg

SEQ ID NO: 940 - DNA, 23 bp, Artificial Sequence
  Description of Artificial Sequence: Synthetic oligonucleotide
acccgtttatgatgacaagctgg

SEQ ID NO: 941 - DNA, 23 bp, Artificial Sequence
  Description of Artificial Sequence: Synthetic oligonucleotide
tatgatgacaagctggctacagg

SEQ ID NO: 942 - DNA, 23 bp, Artificial Sequence
  Description of Artificial Sequence: Synthetic oligonucleotide
atgatgacaagctggctacaggg

SEQ ID NO: 943 - DNA, 23 bp, Artificial Sequence
  Description of Artificial Sequence: Synthetic oligonucleotide
gcggcacccccgaaacagtgtgg

SEQ ID NO: 944 - DNA, 23 bp, Artificial Sequence
  Description of Artificial Sequence: Synthetic oligonucleotide
tagcatctgccacactgtttcgg

SEQ ID NO: 945 - DNA, 23 bp, Artificial Sequence
  Description of Artificial Sequence: Synthetic oligonucleotide
agcatctgccacactgtttcggg

SEQ ID NO: 946 - DNA, 23 bp, Artificial Sequence
  Description of Artificial Sequence: Synthetic oligonucleotide
gcatctgccacactgtttcgggg

SEQ ID NO: 947 - DNA, 23 bp, Artificial Sequence
  Description of Artificial Sequence: Synthetic oligonucleotide
catctgccacactgtttcggggg

SEQ ID NO: 948 - DNA, 23 bp, Artificial Sequence
  Description of Artificial Sequence: Synthetic oligonucleotide
cactgtttcgggggtgccgctgg

SEQ ID NO: 949 - DNA, 23 bp, Artificial Sequence
  Description of Artificial Sequence: Synthetic oligonucleotide
actgtttcgggggtgccgctggg

SEQ ID NO: 950 - DNA, 23 bp, Artificial Sequence
  Description of Artificial Sequence: Synthetic oligonucleotide
gggcaaatgcttcagcccagcgg

SEQ ID NO: 951 - DNA, 23 bp, Artificial Sequence
  Description of Artificial Sequence: Synthetic oligonucleotide
cgagctattgttaactagctggg

SEQ ID NO: 952 - DNA, 23 bp, Artificial Sequence
  Description of Artificial Sequence: Synthetic oligonucleotide
tcgagctattgttaactagctgg

SEQ ID NO: 953 - DNA, 23 bp, Artificial Sequence
  Description of Artificial Sequence: Synthetic oligonucleotide
tctcagcctggacactgataggg

SEQ ID NO: 954 - DNA, 23 bp, Artificial Sequence
  Description of Artificial Sequence: Synthetic oligonucleotide
ttctcagcctggacactgatagg

SEQ ID NO: 955 - DNA, 23 bp, Artificial Sequence
  Description of Artificial Sequence: Synthetic oligonucleotide
aacattccctatcagtgtccagg

SEQ ID NO: 956 - DNA, 23 bp, Artificial Sequence
  Description of Artificial Sequence: Synthetic oligonucleotide
cactgacagtattctcagcctgg

SEQ ID NO: 957 - DNA, 23 bp, Artificial Sequence
  Description of Artificial Sequence: Synthetic oligonucleotide
ctgtcagtgatgagtcgccttgg

SEQ ID NO: 958 - DNA, 23 bp, Artificial Sequence
  Description of Artificial Sequence: Synthetic oligonucleotide
agatacaggtacaagagccaagg

SEQ ID NO: 959 - DNA, 23 bp, Artificial Sequence
  Description of Artificial Sequence: Synthetic oligonucleotide
gtcctggcacacaaagatacagg

SEQ ID NO: 960 - DNA, 23 bp, Artificial Sequence
  Description of Artificial Sequence: Synthetic oligonucleotide
tacctgtatctttgtgtgccagg

SEQ ID NO: 961 - DNA, 23 bp, Artificial Sequence
  Description of Artificial Sequence: Synthetic oligonucleotide
tatctttgtgtgccaggacaagg

SEQ ID NO: 962 - DNA, 23 bp, Artificial Sequence
  Description of Artificial Sequence: Synthetic oligonucleotide
ctgttgcttgtgccttgtcctgg

SEQ ID NO: 963 - DNA, 23 bp, Artificial Sequence
  Description of Artificial Sequence: Synthetic oligonucleotide
cctgctcatcaggaacattttgg

SEQ ID NO: 964 - DNA, 23 bp, Artificial Sequence
  Description of Artificial Sequence: Synthetic oligonucleotide
gaggggttgacctgctcatcagg

SEQ ID NO: 965 - DNA, 23 bp, Artificial Sequence
  Description of Artificial Sequence: Synthetic oligonucleotide
ccaaaatgttcctgatgagcagg

SEQ ID NO: 966 - DNA, 23 bp, Artificial Sequence
  Description of Artificial Sequence: Synthetic oligonucleotide
tgatgagcaggtcaacccctcgg

SEQ ID NO: 967 - DNA, 23 bp, Artificial Sequence
  Description of Artificial Sequence: Synthetic oligonucleotide
gatgagcaggtcaacccctcggg

SEQ ID NO: 968 - DNA, 23 bp, Artificial Sequence
  Description of Artificial Sequence: Synthetic oligonucleotide
atgagcaggtcaacccctcgggg

SEQ ID NO: 969 - DNA, 23 bp, Artificial Sequence
  Description of Artificial Sequence: Synthetic oligonucleotide
tgagcaggtcaacccctcggggg

SEQ ID NO: 970 - DNA, 23 bp, Artificial Sequence
  Description of Artificial Sequence: Synthetic oligonucleotide
tatccaaacctgcccccgagggg

SEQ ID NO: 971 - DNA, 23 bp, Artificial Sequence
  Description of Artificial Sequence: Synthetic oligonucleotide
atatccaaacctgcccccgaggg

SEQ ID NO: 972 - DNA, 23 bp, Artificial Sequence
  Description of Artificial Sequence: Synthetic oligonucleotide
catatccaaacctgcccccgagg

SEQ ID NO: 973 - DNA, 23 bp, Artificial Sequence
  Description of Artificial Sequence: Synthetic oligonucleotide
caggtcaacccctcgggggcagg

SEQ ID NO: 974 - DNA, 23 bp, Artificial Sequence
  Description of Artificial Sequence: Synthetic oligonucleotide
caacccctcgggggcaggtttgg

SEQ ID NO: 975 - DNA, 23 bp, Artificial Sequence
  Description of Artificial Sequence: Synthetic oligonucleotide
caggtttggatatgataatgtgg

SEQ ID NO: 976 - DNA, 23 bp, Artificial Sequence
  Description of Artificial Sequence: Synthetic oligonucleotide
gatatgataatgtggtgatgtgg

SEQ ID NO: 977 - DNA, 23 bp, Artificial Sequence
  Description of Artificial Sequence: Synthetic oligonucleotide
atgataatgtggtgatgtggtgg

SEQ ID NO: 978 - DNA, 23 bp, Artificial Sequence
  Description of Artificial Sequence: Synthetic oligonucleotide
cccttgtgctcactgggtaaggg

SEQ ID NO: 979 - DNA, 23 bp, Artificial Sequence
  Description of Artificial Sequence: Synthetic oligonucleotide
ccccttgtgctcactgggtaagg

SEQ ID NO: 980 - DNA, 23 bp, Artificial Sequence
  Description of Artificial Sequence: Synthetic oligonucleotide
ggactccccttgtgctcactggg

SEQ ID NO: 981 - DNA, 23 bp, Artificial Sequence
  Description of Artificial Sequence: Synthetic oligonucleotide
aggactccccttgtgctcactgg

SEQ ID NO: 982 - DNA, 23 bp, Artificial Sequence
  Description of Artificial Sequence: Synthetic oligonucleotide
tcccttacccagtgagcacaagg

SEQ ID NO: 983 - DNA, 23 bp, Artificial Sequence
  Description of Artificial Sequence: Synthetic oligonucleotide
cccttacccagtgagcacaaggg

SEQ ID NO: 984 - DNA, 23 bp, Artificial Sequence
  Description of Artificial Sequence: Synthetic oligonucleotide
ccttacccagtgagcacaagggg

SEQ ID NO: 985 - DNA, 23 bp, Artificial Sequence
  Description of Artificial Sequence: Synthetic oligonucleotide
gagcacaaggggagtcctctagg

SEQ ID NO: 986 - DNA, 23 bp, Artificial Sequence
  Description of Artificial Sequence: Synthetic oligonucleotide
acatttcttccttttcctagagg

SEQ ID NO: 987 - DNA, 23 bp, Artificial Sequence
  Description of Artificial Sequence: Synthetic oligonucleotide
aaggggagtcctctaggaaaagg

SEQ ID NO: 988 - DNA, 23 bp, Artificial Sequence
  Description of Artificial Sequence: Synthetic oligonucleotide
taggaaaaggaagaaatgtctgg

SEQ ID NO: 989 - DNA, 23 bp, Artificial Sequence
  Description of Artificial Sequence: Synthetic oligonucleotide
aaggaagaaatgtctggatgagg

SEQ ID NO: 990 - DNA, 23 bp, Artificial Sequence
  Description of Artificial Sequence: Synthetic oligonucleotide
gaagaaatgtctggatgaggtgg

SEQ ID NO: 991 - DNA, 23 bp, Artificial Sequence
  Description of Artificial Sequence: Synthetic oligonucleotide
aagaaatgtctggatgaggtggg

SEQ ID NO: 992 - DNA, 23 bp, Artificial Sequence
  Description of Artificial Sequence: Synthetic oligonucleotide
agaaatgtctggatgaggtgggg

SEQ ID NO: 993 - DNA, 23 bp, Artificial Sequence
  Description of Artificial Sequence: Synthetic oligonucleotide
gtctggatgaggtggggagatgg

SEQ ID NO: 994 - DNA, 23 bp, Artificial Sequence
  Description of Artificial Sequence: Synthetic oligonucleotide
tctggatgaggtggggagatggg

SEQ ID NO: 995 - DNA, 23 bp, Artificial Sequence
  Description of Artificial Sequence: Synthetic oligonucleotide
ctggatgaggtggggagatgggg

SEQ ID NO: 996 - DNA, 23 bp, Artificial Sequence
  Description of Artificial Sequence: Synthetic oligonucleotide
tggggagatggggttcagagtgg

SEQ ID NO: 997 - DNA, 23 bp, Artificial Sequence
  Description of Artificial Sequence: Synthetic oligonucleotide
atggggttcagagtggactcagg

SEQ ID NO: 998 - DNA, 23 bp, Artificial Sequence
  Description of Artificial Sequence: Synthetic oligonucleotide
aacagctgggactgggcatcggg

SEQ ID NO: 999 - DNA, 23 bp, Artificial Sequence
  Description of Artificial Sequence: Synthetic oligonucleotide
caacagctgggactgggcatcgg

SEQ ID NO: 1000 - DNA, 23 bp, Artificial Sequence
  Description of Artificial Sequence: Synthetic oligonucleotide
ctaggccaacagctgggactggg

SEQ ID NO: 1001 - DNA, 23 bp, Artificial Sequence
  Description of Artificial Sequence: Synthetic oligonucleotide
actaggccaacagctgggactgg

SEQ ID NO: 1002 - DNA, 23 bp, Artificial Sequence
  Description of Artificial Sequence: Synthetic oligonucleotide
cgatgcccagtcccagctgttgg

SEQ ID NO: 1003 - DNA, 23 bp, Artificial Sequence
  Description of Artificial Sequence: Synthetic oligonucleotide
gtgagactaggccaacagctggg

SEQ ID NO: 1004 - DNA, 23 bp, Artificial Sequence
  Description of Artificial Sequence: Synthetic oligonucleotide
tgtgagactaggccaacagctgg

SEQ ID NO: 1005 - DNA, 23 bp, Artificial Sequence
  Description of Artificial Sequence: Synthetic oligonucleotide
ccttctggctttgtgagactagg

SEQ ID NO: 1006 - DNA, 23 bp, Artificial Sequence
  Description of Artificial Sequence: Synthetic oligonucleotide
cctagtctcacaaagccagaagg

SEQ ID NO: 1007 - DNA, 23 bp, Artificial Sequence
  Description of Artificial Sequence: Synthetic oligonucleotide
atgtaaatgtcatatccttctgg

SEQ ID NO: 1008 - DNA, 23 bp, Artificial Sequence
  Description of Artificial Sequence: Synthetic oligonucleotide
acattcaactcttgaatttgtgg

SEQ ID NO: 1009 - DNA, 23 bp, Artificial Sequence
  Description of Artificial Sequence: Synthetic oligonucleotide
tgaatttgtggccactgctttgg

SEQ ID NO: 1010 - DNA, 23 bp, Artificial Sequence
  Description of Artificial Sequence: Synthetic oligonucleotide
tttgaagttgcccaaagcagtgg

SEQ ID NO: 1011 - DNA, 23 bp, Artificial Sequence
  Description of Artificial Sequence: Synthetic oligonucleotide
gaatttgtggccactgctttggg

SEQ ID NO: 1012 - DNA, 23 bp, Artificial Sequence
  Description of Artificial Sequence: Synthetic oligonucleotide
ttatttgatataaaacttctagg

SEQ ID NO: 1013 - DNA, 23 bp, Artificial Sequence
  Description of Artificial Sequence: Synthetic oligonucleotide
taaaacttctaggacaagagagg

SEQ ID NO: 1014 - DNA, 23 bp, Artificial Sequence
  Description of Artificial Sequence: Synthetic oligonucleotide
aggacaagagaggcccttcctgg

SEQ ID NO: 1015 - DNA, 23 bp, Artificial Sequence
  Description of Artificial Sequence: Synthetic oligonucleotide
tacatgtaatgttccaggaaggg

SEQ ID NO: 1016 - DNA, 23 bp, Artificial Sequence
  Description of Artificial Sequence: Synthetic oligonucleotide
ctacatgtaatgttccaggaagg

SEQ ID NO: 1017 - DNA, 23 bp, Artificial Sequence
  Description of Artificial Sequence: Synthetic oligonucleotide
aatactacatgtaatgttccagg

SEQ ID NO: 1018 - DNA, 23 bp, Artificial Sequence
  Description of Artificial Sequence: Synthetic oligonucleotide
ggaacattacatgtagtattagg

SEQ ID NO: 1019 - DNA, 23 bp, Artificial Sequence
  Description of Artificial Sequence: Synthetic oligonucleotide
cattacatgtagtattaggaagg

SEQ ID NO: 1020 - DNA, 23 bp, Artificial Sequence
  Description of Artificial Sequence: Synthetic oligonucleotide
tacatgtagtattaggaaggtgg

SEQ ID NO: 1021 - DNA, 23 bp, Artificial Sequence
  Description of Artificial Sequence: Synthetic oligonucleotide
ttaggaaggtggagctgccctgg

SEQ ID NO: 1022 - DNA, 23 bp, Artificial Sequence
  Description of Artificial Sequence: Synthetic oligonucleotide
agttctctggatcttttccaggg

SEQ ID NO: 1023 - DNA, 23 bp, Artificial Sequence
  Description of Artificial Sequence: Synthetic oligonucleotide
gagttctctggatcttttccagg

SEQ ID NO: 1024 - DNA, 23 bp, Artificial Sequence
  Description of Artificial Sequence: Synthetic oligonucleotide
cttcctctctctgagttctctgg

SEQ ID NO: 1025 - DNA, 23 bp, Artificial Sequence
  Description of Artificial Sequence: Synthetic oligonucleotide
gatccagagaactcagagagagg

SEQ ID NO: 1026 - DNA, 23 bp, Artificial Sequence
  Description of Artificial Sequence: Synthetic oligonucleotide
gagaactcagagagaggaagagg

SEQ ID NO: 1027 - DNA, 23 bp, Artificial Sequence
  Description of Artificial Sequence: Synthetic oligonucleotide
aactcagagagaggaagaggtgg

SEQ ID NO: 1028 - DNA, 23 bp, Artificial Sequence
  Description of Artificial Sequence: Synthetic oligonucleotide
ctctctacaagaacagagatggg

SEQ ID NO: 1029 - DNA, 23 bp, Artificial Sequence
  Description of Artificial Sequence: Synthetic oligonucleotide
gctctctacaagaacagagatgg

SEQ ID NO: 1030 - DNA, 23 bp, Artificial Sequence
  Description of Artificial Sequence: Synthetic oligonucleotide
tgtagagagctcagtaagagtgg

SEQ ID NO: 1031 - DNA, 23 bp, Artificial Sequence
  Description of Artificial Sequence: Synthetic oligonucleotide
agagctcagtaagagtggcttgg

SEQ ID NO: 1032 - DNA, 23 bp, Artificial Sequence
  Description of Artificial Sequence: Synthetic oligonucleotide
ctcagtaagagtggcttggcagg

SEQ ID NO: 1033 - DNA, 23 bp, Artificial Sequence
  Description of Artificial Sequence: Synthetic oligonucleotide
tcagtaagagtggcttggcaggg

SEQ ID NO: 1034 - DNA, 23 bp, Artificial Sequence
  Description of Artificial Sequence: Synthetic oligonucleotide
ggtcttggtctcaggtacacagg

SEQ ID NO: 1035 - DNA, 23 bp, Artificial Sequence
  Description of Artificial Sequence: Synthetic oligonucleotide
tcctcactggtcttggtctcagg

SEQ ID NO: 1036 - DNA, 23 bp, Artificial Sequence
  Description of Artificial Sequence: Synthetic oligonucleotide
agtagcctcctcactggtcttgg

SEQ ID NO: 1037 - DNA, 23 bp, Artificial Sequence
  Description of Artificial Sequence: Synthetic oligonucleotide
acctgagaccaagaccagtgagg

SEQ ID NO: 1038 - DNA, 23 bp, Artificial Sequence
  Description of Artificial Sequence: Synthetic oligonucleotide
tgagaccaagaccagtgaggagg

SEQ ID NO: 1039 - DNA, 23 bp, Artificial Sequence
  Description of Artificial Sequence: Synthetic oligonucleotide
tcagacagtagcctcctcactgg

SEQ ID NO: 1040 - DNA, 23 bp, Artificial Sequence
  Description of Artificial Sequence: Synthetic oligonucleotide
gctactgtctgaccaccatacgg

SEQ ID NO: 1041 - DNA, 23 bp, Artificial Sequence
  Description of Artificial Sequence: Synthetic oligonucleotide
actgaattctgaccgtatggtgg

SEQ ID NO: 1042 - DNA, 23 bp, Artificial Sequence
  Description of Artificial Sequence: Synthetic oligonucleotide
ggcactgaattctgaccgtatgg

SEQ ID NO: 1043 - DNA, 23 bp, Artificial Sequence
  Description of Artificial Sequence: Synthetic oligonucleotide
acggtcagaattcagtgccatgg

SEQ ID NO: 1044 - DNA, 23 bp, Artificial Sequence
  Description of Artificial Sequence: Synthetic oligonucleotide
cggtcagaattcagtgccatggg

SEQ ID NO: 1045 - DNA, 23 bp, Artificial Sequence
  Description of Artificial Sequence: Synthetic oligonucleotide
tcagaattcagtgccatgggtgg

SEQ ID NO: 1046 - DNA, 23 bp, Artificial Sequence
  Description of Artificial Sequence: Synthetic oligonucleotide
ccttcccacctgaccacccatgg

SEQ ID NO: 1047 - DNA, 23 bp, Artificial Sequence
  Description of Artificial Sequence: Synthetic oligonucleotide
attcagtgccatgggtggtcagg

SEQ ID NO: 1048 - DNA, 23 bp, Artificial Sequence
  Description of Artificial Sequence: Synthetic oligonucleotide
cagtgccatgggtggtcaggtgg

SEQ ID NO: 1049 - DNA, 23 bp, Artificial Sequence
  Description of Artificial Sequence: Synthetic oligonucleotide
agtgccatgggtggtcaggtggg

SEQ ID NO: 1050 - DNA, 23 bp, Artificial Sequence
  Description of Artificial Sequence: Synthetic oligonucleotide
ccatgggtggtcaggtgggaagg

SEQ ID NO: 1051 - DNA, 23 bp, Artificial Sequence
  Description of Artificial Sequence: Synthetic oligonucleotide
catgggtggtcaggtgggaaggg

SEQ ID NO: 1052 - DNA, 23 bp, Artificial Sequence
  Description of Artificial Sequence: Synthetic oligonucleotide
atgggtggtcaggtgggaagggg

SEQ ID NO: 1053 - DNA, 23 bp, Artificial Sequence
  Description of Artificial Sequence: Synthetic oligonucleotide
tggtcaggtgggaaggggagagg

SEQ ID NO: 1054 - DNA, 23 bp, Artificial Sequence
  Description of Artificial Sequence: Synthetic oligonucleotide
ggaaggggagaggactgtgctgg

SEQ ID NO: 1055 - DNA, 23 bp, Artificial Sequence
  Description of Artificial Sequence: Synthetic oligonucleotide
ggggagaggactgtgctggctgg

SEQ ID NO: 1056 - DNA, 23 bp, Artificial Sequence
  Description of Artificial Sequence: Synthetic oligonucleotide
ggctggagttgatgttatcctgg

SEQ ID NO: 1057 - DNA, 23 bp, Artificial Sequence
  Description of Artificial Sequence: Synthetic oligonucleotide
gctggagttgatgttatcctggg

SEQ ID NO: 1058 - DNA, 23 bp, Artificial Sequence
  Description of Artificial Sequence: Synthetic oligonucleotide
ctggagttgatgttatcctgggg

SEQ ID NO: 1059 - DNA, 23 bp, Artificial Sequence
  Description of Artificial Sequence: Synthetic oligonucleotide
tctagggacctactttccccagg

SEQ ID NO: 1060 - DNA, 23 bp, Artificial Sequence
  Description of Artificial Sequence: Synthetic oligonucleotide
gatgttatcctggggaaagtagg

SEQ ID NO: 1061 - DNA, 23 bp, Artificial Sequence
  Description of Artificial Sequence: Synthetic oligonucleotide
cactcaactaaaggcatctaggg

SEQ ID NO: 1062 - DNA, 23 bp, Artificial Sequence
  Description of Artificial Sequence: Synthetic oligonucleotide
tcactcaactaaaggcatctagg

SEQ ID NO: 1063 - DNA, 23 bp, Artificial Sequence
  Description of Artificial Sequence: Synthetic oligonucleotide
tctgctcctcactcaactaaagg

SEQ ID NO: 1064 - DNA, 23 bp, Artificial Sequence
  Description of Artificial Sequence: Synthetic oligonucleotide
tagatgcctttagttgagtgagg

SEQ ID NO: 1065 - DNA, 23 bp, Artificial Sequence
  Description of Artificial Sequence: Synthetic oligonucleotide
tagttgagtgaggagcagactgg

SEQ ID NO: 1066 - DNA, 23 bp, Artificial Sequence
  Description of Artificial Sequence: Synthetic oligonucleotide
agttgagtgaggagcagactggg

SEQ ID NO: 1067 - DNA, 23 bp, Artificial Sequence
  Description of Artificial Sequence: Synthetic oligonucleotide
gtgaggagcagactgggaaatgg

SEQ ID NO: 1068 - DNA, 23 bp, Artificial Sequence
  Description of Artificial Sequence: Synthetic oligonucleotide
tgaggagcagactgggaaatggg

SEQ ID NO: 1069 - DNA, 23 bp, Artificial Sequence
  Description of Artificial Sequence: Synthetic oligonucleotide
gggaaatgggagcacagtagtgg

SEQ ID NO: 1070 - DNA, 23 bp, Artificial Sequence
  Description of Artificial Sequence: Synthetic oligonucleotide
aatgggagcacagtagtggttgg

SEQ ID NO: 1071 - DNA, 23 bp, Artificial Sequence
  Description of Artificial Sequence: Synthetic oligonucleotide
atgggagcacagtagtggttggg

SEQ ID NO: 1072 - DNA, 23 bp, Artificial Sequence
  Description of Artificial Sequence: Synthetic oligonucleotide
tgggagcacagtagtggttgggg

SEQ ID NO: 1073 - DNA, 23 bp, Artificial Sequence
  Description of Artificial Sequence: Synthetic oligonucleotide
cagtagtggttggggcaaaaagg

SEQ ID NO: 1074 - DNA, 23 bp, Artificial Sequence
  Description of Artificial Sequence: Synthetic oligonucleotide
aaaaggactgtctctgcatgagg

SEQ ID NO: 1075 - DNA, 23 bp, Artificial Sequence
  Description of Artificial Sequence: Synthetic oligonucleotide
tgtctctgcatgaggtccatagg

SEQ ID NO: 1076 - DNA, 23 bp, Artificial Sequence
  Description of Artificial Sequence: Synthetic oligonucleotide
gagaaaattccaactgcctatgg

SEQ ID NO: 1077 - DNA, 23 bp, Artificial Sequence
  Description of Artificial Sequence: Synthetic oligonucleotide
gcatgaggtccataggcagttgg

SEQ ID NO: 1078 - DNA, 23 bp, Artificial Sequence
  Description of Artificial Sequence: Synthetic oligonucleotide
tctcagcaagactccagagaagg

SEQ ID NO: 1079 - DNA, 23 bp, Artificial Sequence
  Description of Artificial Sequence: Synthetic oligonucleotide
tctgctccagcctccttctctgg

SEQ ID NO: 1080 - DNA, 23 bp, Artificial Sequence
  Description of Artificial Sequence: Synthetic oligonucleotide
cagcaagactccagagaaggagg

SEQ ID NO: 1081 - DNA, 23 bp, Artificial Sequence
  Description of Artificial Sequence: Synthetic oligonucleotide
aagactccagagaaggaggctgg

SEQ ID NO: 1082 - DNA, 23 bp, Artificial Sequence
  Description of Artificial Sequence: Synthetic oligonucleotide
agagaaggaggctggagcagagg

SEQ ID NO: 1083 - DNA, 23 bp, Artificial Sequence
  Description of Artificial Sequence: Synthetic oligonucleotide
gctggagcagaggtgtatgttgg

SEQ ID NO: 1084 - DNA, 23 bp, Artificial Sequence
  Description of Artificial Sequence: Synthetic oligonucleotide
ctggagcagaggtgtatgttggg

SEQ ID NO: 1085 - DNA, 23 bp, Artificial Sequence
  Description of Artificial Sequence: Synthetic oligonucleotide
aggtgtatgttgggatgaaaagg

SEQ ID NO: 1086 - DNA, 23 bp, Artificial Sequence
  Description of Artificial Sequence: Synthetic oligonucleotide
tgaaaaggagtaaagtatcatgg

SEQ ID NO: 1087 - DNA, 23 bp, Artificial Sequence
  Description of Artificial Sequence: Synthetic oligonucleotide
gaaaaggagtaaagtatcatggg

SEQ ID NO: 1088 - DNA, 23 bp, Artificial Sequence
  Description of Artificial Sequence: Synthetic oligonucleotide
aaaaggagtaaagtatcatgggg

SEQ ID NO: 1089 - DNA, 23 bp, Artificial Sequence
  Description of Artificial Sequence: Synthetic oligonucleotide
aaaggagtaaagtatcatggggg

SEQ ID NO: 1090 - DNA, 23 bp, Artificial Sequence
  Description of Artificial Sequence: Synthetic oligonucleotide
ggagtaaagtatcatgggggagg

SEQ ID NO: 1091 - DNA, 23 bp, Artificial Sequence
  Description of Artificial Sequence: Synthetic oligonucleotide
gtaaagtatcatgggggaggagg

SEQ ID NO: 1092 - DNA, 23 bp, Artificial Sequence
  Description of Artificial Sequence: Synthetic oligonucleotide
catgggggaggaggcagctcagg

SEQ ID NO: 1093 - DNA, 23 bp, Artificial Sequence
  Description of Artificial Sequence: Synthetic oligonucleotide
ggaggcagctcaggttgtcaagg

SEQ ID NO: 1094 - DNA, 23 bp, Artificial Sequence
  Description of Artificial Sequence: Synthetic oligonucleotide
gaggcagctcaggttgtcaaggg

SEQ ID NO: 1095 - DNA, 23 bp, Artificial Sequence
  Description of Artificial Sequence: Synthetic oligonucleotide
tcaagggtcaagaaaccagaagg

SEQ ID NO: 1096 - DNA, 23 bp, Artificial Sequence
  Description of Artificial Sequence: Synthetic oligonucleotide
ccaaggtgaaattctccttctgg

SEQ ID NO: 1097 - DNA, 23 bp, Artificial Sequence
  Description of Artificial Sequence: Synthetic oligonucleotide
ccagaaggagaatttcaccttgg

SEQ ID NO: 1098 - DNA, 23 bp, Artificial Sequence
  Description of Artificial Sequence: Synthetic oligonucleotide
gtacccgttgtctgcttccaagg

SEQ ID NO: 1099 - DNA, 23 bp, Artificial Sequence
  Description of Artificial Sequence: Synthetic oligonucleotide
ttcaccttggaagcagacaacgg

SEQ ID NO: 1100 - DNA, 23 bp, Artificial Sequence
  Description of Artificial Sequence: Synthetic oligonucleotide
tcaccttggaagcagacaacggg

SEQ ID NO: 1101 - DNA, 23 bp, Artificial Sequence
  Description of Artificial Sequence: Synthetic oligonucleotide
aaagtattcccctgtatgcttgg

SEQ ID NO: 1102 - DNA, 23 bp, Artificial Sequence
  Description of Artificial Sequence: Synthetic oligonucleotide
acaacgggtaccaagcatacagg

SEQ ID NO: 1103 - DNA, 23 bp, Artificial Sequence
  Description of Artificial Sequence: Synthetic oligonucleotide
caacgggtaccaagcatacaggg

SEQ ID NO: 1104 - DNA, 23 bp, Artificial Sequence
  Description of Artificial Sequence: Synthetic oligonucleotide
aacgggtaccaagcatacagggg

SEQ ID NO: 1105 - DNA, 23 bp, Artificial Sequence
  Description of Artificial Sequence: Synthetic oligonucleotide
gcatacaggggaatactttgtgg

SEQ ID NO: 1106 - DNA, 23 bp, Artificial Sequence
  Description of Artificial Sequence: Synthetic oligonucleotide
ggggaatactttgtggtgagagg

SEQ ID NO: 1107 - DNA, 23 bp, Artificial Sequence
  Description of Artificial Sequence: Synthetic oligonucleotide
gagaggtcacacagagatacagg

SEQ ID NO: 1108 - DNA, 23 bp, Artificial Sequence
  Description of Artificial Sequence: Synthetic oligonucleotide
cagagatacaggagccgacctgg

SEQ ID NO: 1109 - DNA, 23 bp, Artificial Sequence
  Description of Artificial Sequence: Synthetic oligonucleotide
aggctcctgtctcaccaggtcgg

SEQ ID NO: 1110 - DNA, 23 bp, Artificial Sequence
  Description of Artificial Sequence: Synthetic oligonucleotide
ctccaggctcctgtctcaccagg

SEQ ID NO: 1111 - DNA, 23 bp, Artificial Sequence
  Description of Artificial Sequence: Synthetic oligonucleotide
aggagccgacctggtgagacagg

SEQ ID NO: 1112 - DNA, 23 bp, Artificial Sequence
  Description of Artificial Sequence: Synthetic oligonucleotide
gacctggtgagacaggagcctgg

SEQ ID NO: 1113 - DNA, 23 bp, Artificial Sequence
  Description of Artificial Sequence: Synthetic oligonucleotide
aaaagcaggcaggtggctccagg

SEQ ID NO: 1114 - DNA, 23 bp, Artificial Sequence
  Description of Artificial Sequence: Synthetic oligonucleotide
gcctcacaaaagcaggcaggtgg

SEQ ID NO: 1115 - DNA, 23 bp, Artificial Sequence
  Description of Artificial Sequence: Synthetic oligonucleotide
ggggcctcacaaaagcaggcagg

SEQ ID NO: 1116 - DNA, 23 bp, Artificial Sequence
  Description of Artificial Sequence: Synthetic oligonucleotide
gtctggggcctcacaaaagcagg

SEQ ID NO: 1117 - DNA, 23 bp, Artificial Sequence
  Description of Artificial Sequence: Synthetic oligonucleotide
gccacctgcctgcttttgtgagg

SEQ ID NO: 1118 - DNA, 23 bp, Artificial Sequence
  Description of Artificial Sequence: Synthetic oligonucleotide
gatgatagcagtggagtctgggg

SEQ ID NO: 1119 - DNA, 23 bp, Artificial Sequence
  Description of Artificial Sequence: Synthetic oligonucleotide
tgatgatagcagtggagtctggg

SEQ ID NO: 1120 - DNA, 23 bp, Artificial Sequence
  Description of Artificial Sequence: Synthetic oligonucleotide
ctgatgatagcagtggagtctgg

SEQ ID NO: 1121 - DNA, 23 bp, Artificial Sequence
  Description of Artificial Sequence: Synthetic oligonucleotide
gcttcacctgatgatagcagtgg

SEQ ID NO: 1122 - DNA, 23 bp, Artificial Sequence
  Description of Artificial Sequence: Synthetic oligonucleotide
cagactccactgctatcatcagg

SEQ ID NO: 1123 - DNA, 23 bp, Artificial Sequence
  Description of Artificial Sequence: Synthetic oligonucleotide
gcagaaaagcttttgtgtgcagg

SEQ ID NO: 1124 - DNA, 23 bp, Artificial Sequence
  Description of Artificial Sequence: Synthetic oligonucleotide
tctgcatttacaaagagagaagg

SEQ ID NO: 1125 - DNA, 23 bp, Artificial Sequence
  Description of Artificial Sequence: Synthetic oligonucleotide
ctgcatttacaaagagagaaggg

SEQ ID NO: 1126 - DNA, 23 bp, Artificial Sequence
  Description of Artificial Sequence: Synthetic oligonucleotide
acgcattgcaccagaaactcagg

SEQ ID NO: 1127 - DNA, 23 bp, Artificial Sequence
  Description of Artificial Sequence: Synthetic oligonucleotide
gagagaagggcctgagtttctgg

SEQ ID NO: 1128 - DNA, 23 bp, Artificial Sequence
  Description of Artificial Sequence: Synthetic oligonucleotide
caatgcgtcaagctgacatatgg

SEQ ID NO: 1129 - DNA, 23 bp, Artificial Sequence
  Description of Artificial Sequence: Synthetic oligonucleotide
tgacatatggactttattacagg

SEQ ID NO: 1130 - DNA, 23 bp, Artificial Sequence
  Description of Artificial Sequence: Synthetic oligonucleotide
atggactttattacaggaagtgg

SEQ ID NO: 1131 - DNA, 23 bp, Artificial Sequence
  Description of Artificial Sequence: Synthetic oligonucleotide
ttacaggaagtggttaccagtgg

SEQ ID NO: 1132 - DNA, 23 bp, Artificial Sequence
  Description of Artificial Sequence: Synthetic oligonucleotide
tacaggaagtggttaccagtggg

SEQ ID NO: 1133 - DNA, 23 bp, Artificial Sequence
  Description of Artificial Sequence: Synthetic oligonucleotide
gccactaaatagggacccactgg

SEQ ID NO: 1134 - DNA, 23 bp, Artificial Sequence
  Description of Artificial Sequence: Synthetic oligonucleotide
acaataacagccactaaataggg

SEQ ID NO: 1135 - DNA, 23 bp, Artificial Sequence
  Description of Artificial Sequence: Synthetic oligonucleotide
accagtgggtccctatttagtgg

SEQ ID NO: 1136 - DNA, 23 bp, Artificial Sequence
  Description of Artificial Sequence: Synthetic oligonucleotide
cacaataacagccactaaatagg

SEQ ID NO: 1137 - DNA, 23 bp, Artificial Sequence
  Description of Artificial Sequence: Synthetic oligonucleotide
ttattgtgaattttattgttcgg

SEQ ID NO: 1138 - DNA, 23 bp, Artificial Sequence
  Description of Artificial Sequence: Synthetic oligonucleotide
gtatcactccggtgctatttagg

SEQ ID NO: 1139 - DNA, 23 bp, Artificial Sequence
  Description of Artificial Sequence: Synthetic oligonucleotide
tttcagatcctaaatagcaccgg

SEQ ID NO: 1140 - DNA, 23 bp, Artificial Sequence
  Description of Artificial Sequence: Synthetic oligonucleotide
gattagccattgtatcactccgg

SEQ ID NO: 1141 - DNA, 23 bp, Artificial Sequence
  Description of Artificial Sequence: Synthetic oligonucleotide
atagcaccggagtgatacaatgg

SEQ ID NO: 1142 - DNA, 23 bp, Artificial Sequence
  Description of Artificial Sequence: Synthetic oligonucleotide
caatggctaatcaaacaaagagg

SEQ ID NO: 1143 - DNA, 23 bp, Artificial Sequence
  Description of Artificial Sequence: Synthetic oligonucleotide
aatggctaatcaaacaaagaggg

SEQ ID NO: 1144 - DNA, 23 bp, Artificial Sequence
  Description of Artificial Sequence: Synthetic oligonucleotide
taatcaaacaaagagggctgtgg

SEQ ID NO: 1145 - DNA, 23 bp, Artificial Sequence
  Description of Artificial Sequence: Synthetic oligonucleotide
aatcaaacaaagagggctgtggg

SEQ ID NO: 1146 - DNA, 23 bp, Artificial Sequence
  Description of Artificial Sequence: Synthetic oligonucleotide
atcaaacaaagagggctgtgggg

SEQ ID NO: 1147 - DNA, 23 bp, Artificial Sequence
  Description of Artificial Sequence: Synthetic oligonucleotide
agggcctgaaatcacagaggggg

SEQ ID NO: 1148 - DNA, 23 bp, Artificial Sequence
  Description of Artificial Sequence: Synthetic oligonucleotide
cagggcctgaaatcacagagggg

SEQ ID NO: 1149 - DNA, 23 bp, Artificial Sequence
  Description of Artificial Sequence: Synthetic oligonucleotide
ccagggcctgaaatcacagaggg

SEQ ID NO: 1150 - DNA, 23 bp, Artificial Sequence
  Description of Artificial Sequence: Synthetic oligonucleotide
accagggcctgaaatcacagagg

SEQ ID NO: 1151 - DNA, 23 bp, Artificial Sequence
  Description of Artificial Sequence: Synthetic oligonucleotide
gcatccccctctgtgatttcagg

SEQ ID NO: 1152 - DNA, 23 bp, Artificial Sequence
  Description of Artificial Sequence: Synthetic oligonucleotide
ccctctgtgatttcaggccctgg

SEQ ID NO: 1153 - DNA, 23 bp, Artificial Sequence
  Description of Artificial Sequence: Synthetic oligonucleotide
tatggctactaatcaaaccaggg

SEQ ID NO: 1154 - DNA, 23 bp, Artificial Sequence
  Description of Artificial Sequence: Synthetic oligonucleotide
ttatggctactaatcaaaccagg

SEQ ID NO: 1155 - DNA, 23 bp, Artificial Sequence
  Description of Artificial Sequence: Synthetic oligonucleotide
gccacacgtaaaaaattttatgg

SEQ ID NO: 1156 - DNA, 23 bp, Artificial Sequence
  Description of Artificial Sequence: Synthetic oligonucleotide
gccataaaattttttacgtgtgg

SEQ ID NO: 1157 - DNA, 23 bp, Artificial Sequence
  Description of Artificial Sequence: Synthetic oligonucleotide
acgtgtggcactttgagcaaagg

SEQ ID NO: 1158 - DNA, 23 bp, Artificial Sequence
  Description of Artificial Sequence: Synthetic oligonucleotide
ggcactttgagcaaaggtgcagg

SEQ ID NO: 1159 - DNA, 23 bp, Artificial Sequence
  Description of Artificial Sequence: Synthetic oligonucleotide
agcaaaggtgcaggaaattgtgg

SEQ ID NO: 1160 - DNA, 23 bp, Artificial Sequence
  Description of Artificial Sequence: Synthetic oligonucleotide
aggtgcaggaaattgtggtcagg

SEQ ID NO: 1161 - DNA, 23 bp, Artificial Sequence
  Description of Artificial Sequence: Synthetic oligonucleotide
gaaattgtggtcaggaagcctgg

SEQ ID NO: 1162 - DNA, 23 bp, Artificial Sequence
  Description of Artificial Sequence: Synthetic oligonucleotide
aagcctgtcgagaggcagccagg

SEQ ID NO: 1163 - DNA, 23 bp, Artificial Sequence
  Description of Artificial Sequence: Synthetic oligonucleotide
aagcctggctgcctctcgacagg

SEQ ID NO: 1164 - DNA, 23 bp, Artificial Sequence
  Description of Artificial Sequence: Synthetic oligonucleotide
cacaaaggaagcctgtcgagagg

SEQ ID NO: 1165 - DNA, 23 bp, Artificial Sequence
  Description of Artificial Sequence: Synthetic oligonucleotide
tctccctggggctagcacaaagg

SEQ ID NO: 1166 - DNA, 23 bp, Artificial Sequence
  Description of Artificial Sequence: Synthetic oligonucleotide
gcttcctttgtgctagccccagg

SEQ ID NO: 1167 - DNA, 23 bp, Artificial Sequence
  Description of Artificial Sequence: Synthetic oligonucleotide
cttcctttgtgctagccccaggg

SEQ ID NO: 1168 - DNA, 23 bp, Artificial Sequence
  Description of Artificial Sequence: Synthetic oligonucleotide
aaataggcctcctctccctgggg

SEQ ID NO: 1169 - DNA, 23 bp, Artificial Sequence
  Description of Artificial Sequence: Synthetic oligonucleotide
tttgtgctagccccagggagagg

SEQ ID NO: 1170 - DNA, 23 bp, Artificial Sequence
  Description of Artificial Sequence: Synthetic oligonucleotide
taaataggcctcctctccctggg

SEQ ID NO: 1171 - DNA, 23 bp, Artificial Sequence
  Description of Artificial Sequence: Synthetic oligonucleotide
ttaaataggcctcctctccctgg

SEQ ID NO: 1172 - DNA, 23 bp, Artificial Sequence
  Description of Artificial Sequence: Synthetic oligonucleotide
gtgctagccccagggagaggagg

SEQ ID NO: 1173 - DNA, 23 bp, Artificial Sequence
  Description of Artificial Sequence: Synthetic oligonucleotide
cttggacttggctgttaaatagg

SEQ ID NO: 1174 - DNA, 23 bp, Artificial Sequence
  Description of Artificial Sequence: Synthetic oligonucleotide
ccatgatgtcaacttggacttgg

SEQ ID NO: 1175 - DNA, 23 bp, Artificial Sequence
  Description of Artificial Sequence: Synthetic oligonucleotide
ccagtcccatgatgtcaacttgg

SEQ ID NO: 1176 - DNA, 23 bp, Artificial Sequence
  Description of Artificial Sequence: Synthetic oligonucleotide
ccaagtccaagttgacatcatgg

SEQ ID NO: 1177 - DNA, 23 bp, Artificial Sequence
  Description of Artificial Sequence: Synthetic oligonucleotide
caagtccaagttgacatcatggg

SEQ ID NO: 1178 - DNA, 23 bp, Artificial Sequence
  Description of Artificial Sequence: Synthetic oligonucleotide
ccaagttgacatcatgggactgg

SEQ ID NO: 1179 - DNA, 23 bp, Artificial Sequence
  Description of Artificial Sequence: Synthetic oligonucleotide
gggactggaatagtcatagcagg

SEQ ID NO: 1180 - DNA, 23 bp, Artificial Sequence
  Description of Artificial Sequence: Synthetic oligonucleotide
gagctcagacatcataaacgtgg

SEQ ID NO: 1181 - DNA, 23 bp, Artificial Sequence
  Description of Artificial Sequence: Synthetic oligonucleotide
agacatcataaacgtggcatagg

SEQ ID NO: 1182 - DNA, 23 bp, Artificial Sequence
  Description of Artificial Sequence: Synthetic oligonucleotide
gacatcataaacgtggcataggg

SEQ ID NO: 1183 - DNA, 23 bp, Artificial Sequence
  Description of Artificial Sequence: Synthetic oligonucleotide
atcataaacgtggcatagggagg

SEQ ID NO: 1184 - DNA, 23 bp, Artificial Sequence
  Description of Artificial Sequence: Synthetic oligonucleotide
tcataaacgtggcatagggaggg

SEQ ID NO: 1185 - DNA, 23 bp, Artificial Sequence
  Description of Artificial Sequence: Synthetic oligonucleotide
aaacgtggcatagggagggctgg

SEQ ID NO: 1186 - DNA, 23 bp, Artificial Sequence
  Description of Artificial Sequence: Synthetic oligonucleotide
cgtggcatagggagggctggtgg

SEQ ID NO: 1187 - DNA, 23 bp, Artificial Sequence
  Description of Artificial Sequence: Synthetic oligonucleotide
ggcatagggagggctggtggagg

SEQ ID NO: 1188 - DNA, 23 bp, Artificial Sequence
  Description of Artificial Sequence: Synthetic oligonucleotide
agggctggtggaggagctagcgg

SEQ ID NO: 1189 - DNA, 23 bp, Artificial Sequence
  Description of Artificial Sequence: Synthetic oligonucleotide
gggctggtggaggagctagcggg

SEQ ID NO: 1190 - DNA, 23 bp, Artificial Sequence
  Description of Artificial Sequence: Synthetic oligonucleotide
ggtggaggagctagcgggtatgg

SEQ ID NO: 1191 - DNA, 23 bp, Artificial Sequence
  Description of Artificial Sequence: Synthetic oligonucleotide
gtggaggagctagcgggtatggg

SEQ ID NO: 1192 - DNA, 23 bp, Artificial Sequence
  Description of Artificial Sequence: Synthetic oligonucleotide
gaggagctagcgggtatgggtgg

SEQ ID NO: 1193 - DNA, 23 bp, Artificial Sequence
  Description of Artificial Sequence: Synthetic oligonucleotide
tgaaacaatttcaagacttttgg

SEQ ID NO: 1194 - DNA, 23 bp, Artificial Sequence
  Description of Artificial Sequence: Synthetic oligonucleotide
acaagtgcgaagcccttctctgg

SEQ ID NO: 1195 - DNA, 23 bp, Artificial Sequence
  Description of Artificial Sequence: Synthetic oligonucleotide
ctcatcttggctccagagaaggg

SEQ ID NO: 1196 - DNA, 23 bp, Artificial Sequence
  Description of Artificial Sequence: Synthetic oligonucleotide
gctcatcttggctccagagaagg

SEQ ID NO: 1197 - DNA, 23 bp, Artificial Sequence
  Description of Artificial Sequence: Synthetic oligonucleotide
agtgctctgccagctcatcttgg

SEQ ID NO: 1198 - DNA, 23 bp, Artificial Sequence
  Description of Artificial Sequence: Synthetic oligonucleotide
tctctggagccaagatgagctgg

SEQ ID NO: 1199 - DNA, 23 bp, Artificial Sequence
  Description of Artificial Sequence: Synthetic oligonucleotide
acacttgctactagagaaacagg

SEQ ID NO: 1200 - DNA, 23 bp, Artificial Sequence
  Description of Artificial Sequence: Synthetic oligonucleotide
tagcaagtgttcctttgcccagg

SEQ ID NO: 1201 - DNA, 23 bp, Artificial Sequence
  Description of Artificial Sequence: Synthetic oligonucleotide
atatttttgcccctgggcaaagg

SEQ ID NO: 1202 - DNA, 23 bp, Artificial Sequence
  Description of Artificial Sequence: Synthetic oligonucleotide
agcaagtgttcctttgcccaggg

SEQ ID NO: 1203 - DNA, 23 bp, Artificial Sequence
  Description of Artificial Sequence: Synthetic oligonucleotide
gcaagtgttcctttgcccagggg

SEQ ID NO: 1204 - DNA, 23 bp, Artificial Sequence
  Description of Artificial Sequence: Synthetic oligonucleotide
gtattaatatttttgcccctggg

SEQ ID NO: 1205 - DNA, 23 bp, Artificial Sequence
  Description of Artificial Sequence: Synthetic oligonucleotide
agtattaatatttttgcccctgg

SEQ ID NO: 1206 - DNA, 23 bp, Artificial Sequence
  Description of Artificial Sequence: Synthetic oligonucleotide
aagcattaatgcagtgctgaagg

SEQ ID NO: 1207 - DNA, 23 bp, Artificial Sequence
  Description of Artificial Sequence: Synthetic oligonucleotide
tccccagtgccctgcccagaagg

SEQ ID NO: 1208 - DNA, 23 bp, Artificial Sequence
  Description of Artificial Sequence: Synthetic oligonucleotide
agtaggtgtccttctgggcaggg

SEQ ID NO: 1209 - DNA, 23 bp, Artificial Sequence
  Description of Artificial Sequence: Synthetic oligonucleotide
tgtccttctgggcagggcactgg

SEQ ID NO: 1210 - DNA, 23 bp, Artificial Sequence
  Description of Artificial Sequence: Synthetic oligonucleotide
gtccttctgggcagggcactggg

SEQ ID NO: 1211 - DNA, 23 bp, Artificial Sequence
  Description of Artificial Sequence: Synthetic oligonucleotide
tccttctgggcagggcactgggg

SEQ ID NO: 1212 - DNA, 23 bp, Artificial Sequence
  Description of Artificial Sequence: Synthetic oligonucleotide
actggggacagctgacgtgaagg

SEQ ID NO: 1213 - DNA, 23 bp, Artificial Sequence
  Description of Artificial Sequence: Synthetic oligonucleotide
aaggttgtgggatataagggagg

SEQ ID NO: 1214 - DNA, 23 bp, Artificial Sequence
  Description of Artificial Sequence: Synthetic oligonucleotide
accaaggttgtgggatataaggg

SEQ ID NO: 1215 - DNA, 23 bp, Artificial Sequence
  Description of Artificial Sequence: Synthetic oligonucleotide
gaccaaggttgtgggatataagg

SEQ ID NO: 1216 - DNA, 23 bp, Artificial Sequence
  Description of Artificial Sequence: Synthetic oligonucleotide
cctcttgggaccaaggttgtggg

SEQ ID NO: 1217 - DNA, 23 bp, Artificial Sequence
  Description of Artificial Sequence: Synthetic oligonucleotide
tcccttatatcccacaaccttgg

SEQ ID NO: 1218 - DNA, 23 bp, Artificial Sequence
  Description of Artificial Sequence: Synthetic oligonucleotide
tcctcttgggaccaaggttgtgg

SEQ ID NO: 1219 - DNA, 23 bp, Artificial Sequence
  Description of Artificial Sequence: Synthetic oligonucleotide
tttttttcctcttgggaccaagg

SEQ ID NO: 1220 - DNA, 23 bp, Artificial Sequence
  Description of Artificial Sequence: Synthetic oligonucleotide
cccacaaccttggtcccaagagg

SEQ ID NO: 1221 - DNA, 23 bp, Artificial Sequence
  Description of Artificial Sequence: Synthetic oligonucleotide
atcttcttttttttcctcttggg

SEQ ID NO: 1222 - DNA, 23 bp, Artificial Sequence
  Description of Artificial Sequence: Synthetic oligonucleotide
catcttcttttttttcctcttgg

SEQ ID NO: 1223 - DNA, 23 bp, Artificial Sequence
  Description of Artificial Sequence: Synthetic oligonucleotide
caagaggaaaaaaaagaagatgg

SEQ ID NO: 1224 - DNA, 23 bp, Artificial Sequence
  Description of Artificial Sequence: Synthetic oligonucleotide
gtatgggtctggggtctgcttgg

SEQ ID NO: 1225 - DNA, 23 bp, Artificial Sequence
  Description of Artificial Sequence: Synthetic oligonucleotide
gaggcactagtatgggtctgggg

SEQ ID NO: 1226 - DNA, 23 bp, Artificial Sequence
  Description of Artificial Sequence: Synthetic oligonucleotide
ggaggcactagtatgggtctggg

SEQ ID NO: 1227 - DNA, 23 bp, Artificial Sequence
  Description of Artificial Sequence: Synthetic oligonucleotide
aggaggcactagtatgggtctgg

SEQ ID NO: 1228 - DNA, 23 bp, Artificial Sequence
  Description of Artificial Sequence: Synthetic oligonucleotide
aggaaaggaggcactagtatggg

SEQ ID NO: 1229 - DNA, 23 bp, Artificial Sequence
  Description of Artificial Sequence: Synthetic oligonucleotide
caggaaaggaggcactagtatgg

SEQ ID NO: 1230 - DNA, 23 bp, Artificial Sequence
  Description of Artificial Sequence: Synthetic oligonucleotide
gggatatgaaacaggaaaggagg

SEQ ID NO: 1231 - DNA, 23 bp, Artificial Sequence
  Description of Artificial Sequence: Synthetic oligonucleotide
acagggatatgaaacaggaaagg

SEQ ID NO: 1232 - DNA, 23 bp, Artificial Sequence
  Description of Artificial Sequence: Synthetic oligonucleotide
gctgcacagggatatgaaacagg

SEQ ID NO: 1233 - DNA, 23 bp, Artificial Sequence
  Description of Artificial Sequence: Synthetic oligonucleotide
agatcccagctggctgcacaggg

SEQ ID NO: 1234 - DNA, 23 bp, Artificial Sequence
  Description of Artificial Sequence: Synthetic oligonucleotide
gagatcccagctggctgcacagg

SEQ ID NO: 1235 - DNA, 23 bp, Artificial Sequence
  Description of Artificial Sequence: Synthetic oligonucleotide
catatccctgtgcagccagctgg

SEQ ID NO: 1236 - DNA, 23 bp, Artificial Sequence
  Description of Artificial Sequence: Synthetic oligonucleotide
atatccctgtgcagccagctggg

SEQ ID NO: 1237 - DNA, 23 bp, Artificial Sequence
  Description of Artificial Sequence: Synthetic oligonucleotide
attattcaagagatcccagctgg

SEQ ID NO: 1238 - DNA, 23 bp, Artificial Sequence
  Description of Artificial Sequence: Synthetic oligonucleotide
atctcttgaataatctgctctgg

SEQ ID NO: 1239 - DNA, 23 bp, Artificial Sequence
  Description of Artificial Sequence: Synthetic oligonucleotide
tctcttgaataatctgctctggg

SEQ ID NO: 1240 - DNA, 23 bp, Artificial Sequence
  Description of Artificial Sequence: Synthetic oligonucleotide
ctcttgaataatctgctctgggg

SEQ ID NO: 1241 - DNA, 23 bp, Artificial Sequence
  Description of Artificial Sequence: Synthetic oligonucleotide
tcttgaataatctgctctggggg

SEQ ID NO: 1242 - DNA, 23 bp, Artificial Sequence
  Description of Artificial Sequence: Synthetic oligonucleotide
tgctctgggggcactgagattgg

SEQ ID NO: 1243 - DNA, 23 bp, Artificial Sequence
  Description of Artificial Sequence: Synthetic oligonucleotide
attggacatacaccaaacagcgg

SEQ ID NO: 1244 - DNA, 23 bp, Artificial Sequence
  Description of Artificial Sequence: Synthetic oligonucleotide
tttggtcgatctccgctgtttgg

SEQ ID NO: 1245 - DNA, 23 bp, Artificial Sequence
  Description of Artificial Sequence: Synthetic oligonucleotide
cactgcccaacagaggcgtttgg

SEQ ID NO: 1246 - DNA, 23 bp, Artificial Sequence
  Description of Artificial Sequence: Synthetic oligonucleotide
gatcgaccaaacgcctctgttgg

SEQ ID NO: 1247 - DNA, 23 bp, Artificial Sequence
  Description of Artificial Sequence: Synthetic oligonucleotide
atcgaccaaacgcctctgttggg

SEQ ID NO: 1248 - DNA, 23 bp, Artificial Sequence
  Description of Artificial Sequence: Synthetic oligonucleotide
caggaaacactgcccaacagagg

SEQ ID NO: 1249 - DNA, 23 bp, Artificial Sequence
  Description of Artificial Sequence: Synthetic oligonucleotide
ctgttgggcagtgtttcctgagg

SEQ ID NO: 1250 - DNA, 23 bp, Artificial Sequence
  Description of Artificial Sequence: Synthetic oligonucleotide
tgttgggcagtgtttcctgaggg

SEQ ID NO: 1251 - DNA, 23 bp, Artificial Sequence
  Description of Artificial Sequence: Synthetic oligonucleotide
cagaatgggacagaaccctcagg

SEQ ID NO: 1252 - DNA, 23 bp, Artificial Sequence
  Description of Artificial Sequence: Synthetic oligonucleotide
agcctcctagtttacagaatggg

SEQ ID NO: 1253 - DNA, 23 bp, Artificial Sequence
  Description of Artificial Sequence: Synthetic oligonucleotide
cagcctcctagtttacagaatgg

SEQ ID NO: 1254 - DNA, 23 bp, Artificial Sequence
  Description of Artificial Sequence: Synthetic oligonucleotide
tctgtcccattctgtaaactagg

SEQ ID NO: 1255 - DNA, 23 bp, Artificial Sequence
  Description of Artificial Sequence: Synthetic oligonucleotide
gtcccattctgtaaactaggagg

SEQ ID NO: 1256 - DNA, 23 bp, Artificial Sequence
  Description of Artificial Sequence: Synthetic oligonucleotide
aggaggctgactagctgacaagg

SEQ ID NO: 1257 - DNA, 23 bp, Artificial Sequence
  Description of Artificial Sequence: Synthetic oligonucleotide
gacaaggaattttattctgttgg

SEQ ID NO: 1258 - DNA, 23 bp, Artificial Sequence
  Description of Artificial Sequence: Synthetic oligonucleotide
acaaggaattttattctgttggg

SEQ ID NO: 1259 - DNA, 23 bp, Artificial Sequence
  Description of Artificial Sequence: Synthetic oligonucleotide
tcttaccccaggtggcacatagg

SEQ ID NO: 1260 - DNA, 23 bp, Artificial Sequence
  Description of Artificial Sequence: Synthetic oligonucleotide
acatgaacctatgtgccacctgg

SEQ ID NO: 1261 - DNA, 23 bp, Artificial Sequence
  Description of Artificial Sequence: Synthetic oligonucleotide
catgaacctatgtgccacctggg

SEQ ID NO: 1262 - DNA, 23 bp, Artificial Sequence
  Description of Artificial Sequence: Synthetic oligonucleotide
atgaacctatgtgccacctgggg

SEQ ID NO: 1263 - DNA, 23 bp, Artificial Sequence
  Description of Artificial Sequence: Synthetic oligonucleotide
ccacagggtcttaccccaggtgg

SEQ ID NO: 1264 - DNA, 23 bp, Artificial Sequence
  Description of Artificial Sequence: Synthetic oligonucleotide
ctaccacagggtcttaccccagg

SEQ ID NO: 1265 - DNA, 23 bp, Artificial Sequence
  Description of Artificial Sequence: Synthetic oligonucleotide
ccacctggggtaagaccctgtgg

SEQ ID NO: 1266 - DNA, 23 bp, Artificial Sequence
  Description of Artificial Sequence: Synthetic oligonucleotide
ctggggtaagaccctgtggtagg

SEQ ID NO: 1267 - DNA, 23 bp, Artificial Sequence
  Description of Artificial Sequence: Synthetic oligonucleotide
tcatgtttctacctaccacaggg

SEQ ID NO: 1268 - DNA, 23 bp, Artificial Sequence
  Description of Artificial Sequence: Synthetic oligonucleotide
gtcatgtttctacctaccacagg

SEQ ID NO: 1269 - DNA, 23 bp, Artificial Sequence
  Description of Artificial Sequence: Synthetic oligonucleotide
attaggatgtggacatttttggg

SEQ ID NO: 1270 - DNA, 23 bp, Artificial Sequence
  Description of Artificial Sequence: Synthetic oligonucleotide
gattaggatgtggacatttttgg

SEQ ID NO: 1271 - DNA, 23 bp, Artificial Sequence
  Description of Artificial Sequence: Synthetic oligonucleotide
cagaattagagattaggatgtgg

SEQ ID NO: 1272 - DNA, 23 bp, Artificial Sequence
  Description of Artificial Sequence: Synthetic oligonucleotide
tatttacagaattagagattagg

SEQ ID NO: 1273 - DNA, 23 bp, Artificial Sequence
  Description of Artificial Sequence: Synthetic oligonucleotide
ctgtaaatatattcccttactgg

SEQ ID NO: 1274 - DNA, 23 bp, Artificial Sequence
  Description of Artificial Sequence: Synthetic oligonucleotide
aaagtctctttttccagtaaggg

SEQ ID NO: 1275 - DNA, 23 bp, Artificial Sequence
  Description of Artificial Sequence: Synthetic oligonucleotide
caaagtctctttttccagtaagg

SEQ ID NO: 1276 - DNA, 23 bp, Artificial Sequence
  Description of Artificial Sequence: Synthetic oligonucleotide
actggaaaaagagactttgcagg

SEQ ID NO: 1277 - DNA, 23 bp, Artificial Sequence
  Description of Artificial Sequence: Synthetic oligonucleotide
ttgcaggtgtgattaaattaagg

SEQ ID NO: 1278 - DNA, 23 bp, Artificial Sequence
  Description of Artificial Sequence: Synthetic oligonucleotide
attaaattaaggatcataagagg

SEQ ID NO: 1279 - DNA, 23 bp, Artificial Sequence
  Description of Artificial Sequence: Synthetic oligonucleotide
ttaaattaaggatcataagaggg

SEQ ID NO: 1280 - DNA, 23 bp, Artificial Sequence
  Description of Artificial Sequence: Synthetic oligonucleotide
ataagagggagagattatccagg

SEQ ID NO: 1281 - DNA, 23 bp, Artificial Sequence
  Description of Artificial Sequence: Synthetic oligonucleotide
ttagactcatcaaataatcctgg

SEQ ID NO: 1282 - DNA, 23 bp, Artificial Sequence
  Description of Artificial Sequence: Synthetic oligonucleotide
atgagtctaatataatcatcagg

SEQ ID NO: 1283 - DNA, 23 bp, Artificial Sequence
  Description of Artificial Sequence: Synthetic oligonucleotide
tgagtctaatataatcatcaggg

SEQ ID NO: 1284 - DNA, 23 bp, Artificial Sequence
  Description of Artificial Sequence: Synthetic oligonucleotide
atcatcagggtacttaaaagagg

SEQ ID NO: 1285 - DNA, 23 bp, Artificial Sequence
  Description of Artificial Sequence: Synthetic oligonucleotide
tcatcagggtacttaaaagaggg

SEQ ID NO: 1286 - DNA, 23 bp, Artificial Sequence
  Description of Artificial Sequence: Synthetic oligonucleotide
tcagggtacttaaaagagggagg

SEQ ID NO: 1287 - DNA, 23 bp, Artificial Sequence
  Description of Artificial Sequence: Synthetic oligonucleotide
ggtacttaaaagagggaggcagg

SEQ ID NO: 1288 - DNA, 23 bp, Artificial Sequence
  Description of Artificial Sequence: Synthetic oligonucleotide
agagggaggcaggctgtgcctgg

SEQ ID NO: 1289 - DNA, 23 bp, Artificial Sequence
  Description of Artificial Sequence: Synthetic oligonucleotide
gggaggcaggctgtgcctggtgg

SEQ ID NO: 1290 - DNA, 23 bp, Artificial Sequence
  Description of Artificial Sequence: Synthetic oligonucleotide
gattaaaggcgtgaaccaccagg

SEQ ID NO: 1291 - DNA, 23 bp, Artificial Sequence
  Description of Artificial Sequence: Synthetic oligonucleotide
tcccaaagtgctgggattaaagg

SEQ ID NO: 1292 - DNA, 23 bp, Artificial Sequence
  Description of Artificial Sequence: Synthetic oligonucleotide
cctcagtctcccaaagtgctggg

SEQ ID NO: 1293 - DNA, 23 bp, Artificial Sequence
  Description of Artificial Sequence: Synthetic oligonucleotide
cgcctttaatcccagcactttgg

SEQ ID NO: 1294 - DNA, 23 bp, Artificial Sequence
  Description of Artificial Sequence: Synthetic oligonucleotide
gcctcagtctcccaaagtgctgg

SEQ ID NO: 1295 - DNA, 23 bp, Artificial Sequence
  Description of Artificial Sequence: Synthetic oligonucleotide
gcctttaatcccagcactttggg

SEQ ID NO: 1296 - DNA, 23 bp, Artificial Sequence
  Description of Artificial Sequence: Synthetic oligonucleotide
cccagcactttgggagactgagg

SEQ ID NO: 1297 - DNA, 23 bp, Artificial Sequence
  Description of Artificial Sequence: Synthetic oligonucleotide
ctttgggagactgaggcgagcgg

SEQ ID NO: 1298 - DNA, 23 bp, Artificial Sequence
  Description of Artificial Sequence: Synthetic oligonucleotide
tttgggagactgaggcgagcggg

SEQ ID NO: 1299 - DNA, 23 bp, Artificial Sequence
  Description of Artificial Sequence: Synthetic oligonucleotide
actgaggcgagcgggtcacgagg

SEQ ID NO: 1300 - DNA, 23 bp, Artificial Sequence
  Description of Artificial Sequence: Synthetic oligonucleotide
ggcgagcgggtcacgaggacagg

SEQ ID NO: 1301 - DNA, 23 bp, Artificial Sequence
  Description of Artificial Sequence: Synthetic oligonucleotide
cgggtcacgaggacaggagttgg

SEQ ID NO: 1302 - DNA, 23 bp, Artificial Sequence
  Description of Artificial Sequence: Synthetic oligonucleotide
tttcaccatgttggtcaggctgg

SEQ ID NO: 1303 - DNA, 23 bp, Artificial Sequence
  Description of Artificial Sequence: Synthetic oligonucleotide
ggagtttcaccatgttggtcagg

SEQ ID NO: 1304 - DNA, 23 bp, Artificial Sequence
  Description of Artificial Sequence: Synthetic oligonucleotide
ggagaccagcctgaccaacatgg

SEQ ID NO: 1305 - DNA, 23 bp, Artificial Sequence
  Description of Artificial Sequence: Synthetic oligonucleotide
gagggggagtttcaccatgttgg

SEQ ID NO: 1306 - DNA, 23 bp, Artificial Sequence
  Description of Artificial Sequence: Synthetic oligonucleotide
atttttttttttactagaggggg

SEQ ID NO: 1307 - DNA, 23 bp, Artificial Sequence
  Description of Artificial Sequence: Synthetic oligonucleotide
tatttttttttttactagagggg

SEQ ID NO: 1308 - DNA, 23 bp, Artificial Sequence
  Description of Artificial Sequence: Synthetic oligonucleotide
gtatttttttttttactagaggg

SEQ ID NO: 1309 - DNA, 23 bp, Artificial Sequence
  Description of Artificial Sequence: Synthetic oligonucleotide
tgtatttttttttttactagagg

SEQ ID NO: 1310 - DNA, 23 bp, Artificial Sequence
  Description of Artificial Sequence: Synthetic oligonucleotide
aaaaaatacaaaaattagccagg

SEQ ID NO: 1311 - DNA, 23 bp, Artificial Sequence
  Description of Artificial Sequence: Synthetic oligonucleotide
atacaaaaattagccaggcatgg

SEQ ID NO: 1312 - DNA, 23 bp, Artificial Sequence
  Description of Artificial Sequence: Synthetic oligonucleotide
caggtgtgtaccaccatgcctgg

SEQ ID NO: 1313 - DNA, 23 bp, Artificial Sequence
  Description of Artificial Sequence: Synthetic oligonucleotide
caaaaattagccaggcatggtgg

SEQ ID NO: 1314 - DNA, 23 bp, Artificial Sequence
  Description of Artificial Sequence: Synthetic oligonucleotide
tcctgagtagctgggattacagg

SEQ ID NO: 1315 - DNA, 23 bp, Artificial Sequence
  Description of Artificial Sequence: Synthetic oligonucleotide
cctcagcctcctgagtagctggg

SEQ ID NO: 1316 - DNA, 23 bp, Artificial Sequence
  Description of Artificial Sequence: Synthetic oligonucleotide
gcctcagcctcctgagtagctgg

SEQ ID NO: 1317 - DNA, 23 bp, Artificial Sequence
  Description of Artificial Sequence: Synthetic oligonucleotide
acctgtaatcccagctactcagg

SEQ ID NO: 1318 - DNA, 23 bp, Artificial Sequence
  Description of Artificial Sequence: Synthetic oligonucleotide
tgtaatcccagctactcaggagg

SEQ ID NO: 1319 - DNA, 23 bp, Artificial Sequence
  Description of Artificial Sequence: Synthetic oligonucleotide
cccagctactcaggaggctgagg

SEQ ID NO: 1320 - DNA, 23 bp, Artificial Sequence
  Description of Artificial Sequence: Synthetic oligonucleotide
agctactcaggaggctgaggcgg

SEQ ID NO: 1321 - DNA, 23 bp, Artificial Sequence
  Description of Artificial Sequence: Synthetic oligonucleotide
gctactcaggaggctgaggcggg

SEQ ID NO: 1322 - DNA, 23 bp, Artificial Sequence
  Description of Artificial Sequence: Synthetic oligonucleotide
cgggagaattgcttgaacccagg

SEQ ID NO: 1323 - DNA, 23 bp, Artificial Sequence
  Description of Artificial Sequence: Synthetic oligonucleotide
gagaattgcttgaacccaggagg

SEQ ID NO: 1324 - DNA, 23 bp, Artificial Sequence
  Description of Artificial Sequence: Synthetic oligonucleotide
caccacaacctctgcctcctggg

SEQ ID NO: 1325 - DNA, 23 bp, Artificial Sequence
  Description of Artificial Sequence: Synthetic oligonucleotide
tcaccacaacctctgcctcctgg

SEQ ID NO: 1326 - DNA, 23 bp, Artificial Sequence
  Description of Artificial Sequence: Synthetic oligonucleotide
tgcttgaacccaggaggcagagg

SEQ ID NO: 1327 - DNA, 23 bp, Artificial Sequence
  Description of Artificial Sequence: Synthetic oligonucleotide
aacccaggaggcagaggttgtgg

SEQ ID NO: 1328 - DNA, 23 bp, Artificial Sequence
  Description of Artificial Sequence: Synthetic oligonucleotide
ttgcccaggctggagggcagtgg

SEQ ID NO: 1329 - DNA, 23 bp, Artificial Sequence
  Description of Artificial Sequence: Synthetic oligonucleotide
gctctgttgcccaggctggaggg

SEQ ID NO: 1330 - DNA, 23 bp, Artificial Sequence
  Description of Artificial Sequence: Synthetic oligonucleotide
cgcaccactgccctccagcctgg

SEQ ID NO: 1331 - DNA, 23 bp, Artificial Sequence
  Description of Artificial Sequence: Synthetic oligonucleotide
tgctctgttgcccaggctggagg

SEQ ID NO: 1332 - DNA, 23 bp, Artificial Sequence
  Description of Artificial Sequence: Synthetic oligonucleotide
gcaccactgccctccagcctggg

SEQ ID NO: 1333 - DNA, 23 bp, Artificial Sequence
  Description of Artificial Sequence: Synthetic oligonucleotide
tcttgctctgttgcccaggctgg

SEQ ID NO: 1334 - DNA, 23 bp, Artificial Sequence
  Description of Artificial Sequence: Synthetic oligonucleotide
ggagtcttgctctgttgcccagg

SEQ ID NO: 1335 - DNA, 23 bp, Artificial Sequence
  Description of Artificial Sequence: Synthetic oligonucleotide
ctctttttttttttttgagatgg

SEQ ID NO: 1336 - DNA, 23 bp, Artificial Sequence
  Description of Artificial Sequence: Synthetic oligonucleotide
catctcaaaaaaaaaaaaagagg

SEQ ID NO: 1337 - DNA, 23 bp, Artificial Sequence
  Description of Artificial Sequence: Synthetic oligonucleotide
atctcaaaaaaaaaaaaagaggg

SEQ ID NO: 1338 - DNA, 23 bp, Artificial Sequence
  Description of Artificial Sequence: Synthetic oligonucleotide
tcaaaaaaaaaaaaagagggagg

SEQ ID NO: 1339 - DNA, 23 bp, Artificial Sequence
  Description of Artificial Sequence: Synthetic oligonucleotide
aaaaaaaaagagggaggcagtgg

SEQ ID NO: 1340 - DNA, 23 bp, Artificial Sequence
  Description of Artificial Sequence: Synthetic oligonucleotide
aaaaaaaagagggaggcagtggg

SEQ ID NO: 1341 - DNA, 23 bp, Artificial Sequence
  Description of Artificial Sequence: Synthetic oligonucleotide
agtgggatcagagtcagagaagg

SEQ ID NO: 1342 - DNA, 23 bp, Artificial Sequence
  Description of Artificial Sequence: Synthetic oligonucleotide
tgcctgcattccttggcttgtgg

SEQ ID NO: 1343 - DNA, 23 bp, Artificial Sequence
  Description of Artificial Sequence: Synthetic oligonucleotide
agtgatgcaaccacaagccaagg

SEQ ID NO: 1344 - DNA, 23 bp, Artificial Sequence
  Description of Artificial Sequence: Synthetic oligonucleotide
gagaagctgcctgcattccttgg

SEQ ID NO: 1345 - DNA, 23 bp, Artificial Sequence
  Description of Artificial Sequence: Synthetic oligonucleotide
aaccacaagccaaggaatgcagg

SEQ ID NO: 1346 - DNA, 23 bp, Artificial Sequence
  Description of Artificial Sequence: Synthetic oligonucleotide
tgcaggcagcttctcaaagctgg

SEQ ID NO: 1347 - DNA, 23 bp, Artificial Sequence
  Description of Artificial Sequence: Synthetic oligonucleotide
gcagcttctcaaagctggaaagg

SEQ ID NO: 1348 - DNA, 23 bp, Artificial Sequence
  Description of Artificial Sequence: Synthetic oligonucleotide
aagctggaaaggacgagcaatgg

SEQ ID NO: 1349 - DNA, 23 bp, Artificial Sequence
  Description of Artificial Sequence: Synthetic oligonucleotide
cattcctcacagaggctgtaggg

SEQ ID NO: 1350 - DNA, 23 bp, Artificial Sequence
  Description of Artificial Sequence: Synthetic oligonucleotide
gcattcctcacagaggctgtagg

SEQ ID NO: 1351 - DNA, 23 bp, Artificial Sequence
  Description of Artificial Sequence: Synthetic oligonucleotide
tcttccctacagcctctgtgagg

SEQ ID NO: 1352 - DNA, 23 bp, Artificial Sequence
  Description of Artificial Sequence: Synthetic oligonucleotide
aaaggctgcattcctcacagagg

SEQ ID NO: 1353 - DNA, 23 bp, Artificial Sequence
  Description of Artificial Sequence: Synthetic oligonucleotide
ccttatggggttaaaatcaaagg

SEQ ID NO: 1354 - DNA, 23 bp, Artificial Sequence
  Description of Artificial Sequence: Synthetic oligonucleotide
cctttgattttaaccccataagg

SEQ ID NO: 1355 - DNA, 23 bp, Artificial Sequence
  Description of Artificial Sequence: Synthetic oligonucleotide
agtcagaaatcggccttatgggg

SEQ ID NO: 1356 - DNA, 23 bp, Artificial Sequence
  Description of Artificial Sequence: Synthetic oligonucleotide
gagtcagaaatcggccttatggg

SEQ ID NO: 1357 - DNA, 23 bp, Artificial Sequence
  Description of Artificial Sequence: Synthetic oligonucleotide
agagtcagaaatcggccttatgg

SEQ ID NO: 1358 - DNA, 23 bp, Artificial Sequence
  Description of Artificial Sequence: Synthetic oligonucleotide
cagaggctagagtcagaaatcgg

SEQ ID NO: 1359 - DNA, 23 bp, Artificial Sequence
  Description of Artificial Sequence: Synthetic oligonucleotide
cgatttctgactctagcctctgg

SEQ ID NO: 1360 - DNA, 23 bp, Artificial Sequence
  Description of Artificial Sequence: Synthetic oligonucleotide
aaattatcttacaattccagagg

SEQ ID NO: 1361 - DNA, 23 bp, Artificial Sequence
  Description of Artificial Sequence: Synthetic oligonucleotide
acaaattaccacaaatttagtgg

SEQ ID NO: 1362 - DNA, 23 bp, Artificial Sequence
  Description of Artificial Sequence: Synthetic oligonucleotide
atctcaagccactaaatttgtgg

SEQ ID NO: 1363 - DNA, 23 bp, Artificial Sequence
  Description of Artificial Sequence: Synthetic oligonucleotide
taatttgtcacagaaagcaatgg

SEQ ID NO: 1364 - DNA, 23 bp, Artificial Sequence
  Description of Artificial Sequence: Synthetic oligonucleotide
aatttgtcacagaaagcaatggg

SEQ ID NO: 1365 - DNA, 23 bp, Artificial Sequence
  Description of Artificial Sequence: Synthetic oligonucleotide
aagcaatgggaagccaacacagg

SEQ ID NO: 1366 - DNA, 23 bp, Artificial Sequence
  Description of Artificial Sequence: Synthetic oligonucleotide
tcaacaaataaggcctgtgttgg

SEQ ID NO: 1367 - DNA, 23 bp, Artificial Sequence
  Description of Artificial Sequence: Synthetic oligonucleotide
catctataagtcaacaaataagg

SEQ ID NO: 1368 - DNA, 23 bp, Artificial Sequence
  Description of Artificial Sequence: Synthetic oligonucleotide
tttcaatgtacttttatcaatgg

SEQ ID NO: 1369 - DNA, 23 bp, Artificial Sequence
  Description of Artificial Sequence: Synthetic oligonucleotide
ttttatcaatggtctcatgtagg

SEQ ID NO: 1370 - DNA, 23 bp, Artificial Sequence
  Description of Artificial Sequence: Synthetic oligonucleotide
tttatcaatggtctcatgtaggg

SEQ ID NO: 1371 - DNA, 23 bp, Artificial Sequence
  Description of Artificial Sequence: Synthetic oligonucleotide
ttaacatagtttcaactttaagg

SEQ ID NO: 1372 - DNA, 23 bp, Artificial Sequence
  Description of Artificial Sequence: Synthetic oligonucleotide
tcaactttaaggtttatatctgg

SEQ ID NO: 1373 - DNA, 23 bp, Artificial Sequence
  Description of Artificial Sequence: Synthetic oligonucleotide
gatgcttactgtttactaagtgg

SEQ ID NO: 1374 - DNA, 23 bp, Artificial Sequence
  Description of Artificial Sequence: Synthetic oligonucleotide
ctgtctcctcatctgtaaatggg

SEQ ID NO: 1375 - DNA, 23 bp, Artificial Sequence
  Description of Artificial Sequence: Synthetic oligonucleotide
cctgtctcctcatctgtaaatgg

SEQ ID NO: 1376 - DNA, 23 bp, Artificial Sequence
  Description of Artificial Sequence: Synthetic oligonucleotide
tattagcccatttacagatgagg

SEQ ID NO: 1377 - DNA, 23 bp, Artificial Sequence
  Description of Artificial Sequence: Synthetic oligonucleotide
ccatttacagatgaggagacagg

SEQ ID NO: 1378 - DNA, 23 bp, Artificial Sequence
  Description of Artificial Sequence: Synthetic oligonucleotide
caaaagacttttatgcaacctgg

SEQ ID NO: 1379 - DNA, 23 bp, Artificial Sequence
  Description of Artificial Sequence: Synthetic oligonucleotide
accagtgaatgactttgaccagg

SEQ ID NO: 1380 - DNA, 23 bp, Artificial Sequence
  Description of Artificial Sequence: Synthetic oligonucleotide
acctggtcaaagtcattcactgg

SEQ ID NO: 1381 - DNA, 23 bp, Artificial Sequence
  Description of Artificial Sequence: Synthetic oligonucleotide
agtcattcactggtaagctgagg

SEQ ID NO: 1382 - DNA, 23 bp, Artificial Sequence
  Description of Artificial Sequence: Synthetic oligonucleotide
cattcactggtaagctgaggagg

SEQ ID NO: 1383 - DNA, 23 bp, Artificial Sequence
  Description of Artificial Sequence: Synthetic oligonucleotide
ctgggggcagcaaaaggaagtgg

SEQ ID NO: 1384 - DNA, 23 bp, Artificial Sequence
  Description of Artificial Sequence: Synthetic oligonucleotide
taccccctgggggcagcaaaagg

SEQ ID NO: 1385 - DNA, 23 bp, Artificial Sequence
  Description of Artificial Sequence: Synthetic oligonucleotide
cacttccttttgctgcccccagg

SEQ ID NO: 1386 - DNA, 23 bp, Artificial Sequence
  Description of Artificial Sequence: Synthetic oligonucleotide
acttccttttgctgcccccaggg

SEQ ID NO: 1387 - DNA, 23 bp, Artificial Sequence
  Description of Artificial Sequence: Synthetic oligonucleotide
cttccttttgctgcccccagggg

SEQ ID NO: 1388 - DNA, 23 bp, Artificial Sequence
  Description of Artificial Sequence: Synthetic oligonucleotide
ttccttttgctgcccccaggggg

SEQ ID NO: 1389 - DNA, 23 bp, Artificial Sequence
  Description of Artificial Sequence: Synthetic oligonucleotide
ccaggcttgataccccctggggg

SEQ ID NO: 1390 - DNA, 23 bp, Artificial Sequence
  Description of Artificial Sequence: Synthetic oligonucleotide
gccaggcttgataccccctgggg

SEQ ID NO: 1391 - DNA, 23 bp, Artificial Sequence
  Description of Artificial Sequence: Synthetic oligonucleotide
tgccaggcttgataccccctggg

SEQ ID NO: 1392 - DNA, 23 bp, Artificial Sequence
  Description of Artificial Sequence: Synthetic oligonucleotide
ctgccaggcttgataccccctgg

SEQ ID NO: 1393 - DNA, 23 bp, Artificial Sequence
  Description of Artificial Sequence: Synthetic oligonucleotide
cccccagggggtatcaagcctgg

SEQ ID NO: 1394 - DNA, 23 bp, Artificial Sequence
  Description of Artificial Sequence: Synthetic oligonucleotide
agtcgctgacactaactgccagg

SEQ ID NO: 1395 - DNA, 23 bp, Artificial Sequence
  Description of Artificial Sequence: Synthetic oligonucleotide
gcagttagtgtcagcgacttagg

SEQ ID NO: 1396 - DNA, 23 bp, Artificial Sequence
  Description of Artificial Sequence: Synthetic oligonucleotide
gttagtgtcagcgacttaggagg

SEQ ID NO: 1397 - DNA, 23 bp, Artificial Sequence
  Description of Artificial Sequence: Synthetic oligonucleotide
taggaggtgaacaagtgagcagg

SEQ ID NO: 1398 - DNA, 23 bp, Artificial Sequence
  Description of Artificial Sequence: Synthetic oligonucleotide
gaacaagtgagcaggcctgtagg

SEQ ID NO: 1399 - DNA, 23 bp, Artificial Sequence
  Description of Artificial Sequence: Synthetic oligonucleotide
gcagtttagccaggtcctacagg

SEQ ID NO: 1400 - DNA, 23 bp, Artificial Sequence
  Description of Artificial Sequence: Synthetic oligonucleotide
gtgagcaggcctgtaggacctgg

SEQ ID NO: 1401 - DNA, 23 bp, Artificial Sequence
  Description of Artificial Sequence: Synthetic oligonucleotide
agacctggggcagtttagccagg

SEQ ID NO: 1402 - DNA, 23 bp, Artificial Sequence
  Description of Artificial Sequence: Synthetic oligonucleotide
ggacctggctaaactgccccagg

SEQ ID NO: 1403 - DNA, 23 bp, Artificial Sequence
  Description of Artificial Sequence: Synthetic oligonucleotide
aggctgtagacagagacctgggg

SEQ ID NO: 1404 - DNA, 23 bp, Artificial Sequence
  Description of Artificial Sequence: Synthetic oligonucleotide
gaggctgtagacagagacctggg

SEQ ID NO: 1405 - DNA, 23 bp, Artificial Sequence
  Description of Artificial Sequence: Synthetic oligonucleotide
tgaggctgtagacagagacctgg

SEQ ID NO: 1406 - DNA, 23 bp, Artificial Sequence
  Description of Artificial Sequence: Synthetic oligonucleotide
gacccacagccacaggtttgagg

SEQ ID NO: 1407 - DNA, 23 bp, Artificial Sequence
  Description of Artificial Sequence: Synthetic oligonucleotide
tgtctacagcctcaaacctgtgg

SEQ ID NO: 1408 - DNA, 23 bp, Artificial Sequence
  Description of Artificial Sequence: Synthetic oligonucleotide
tctctgggacccacagccacagg

SEQ ID NO: 1409 - DNA, 23 bp, Artificial Sequence
  Description of Artificial Sequence: Synthetic oligonucleotide
cagcctcaaacctgtggctgtgg

SEQ ID NO: 1410 - DNA, 23 bp, Artificial Sequence
  Description of Artificial Sequence: Synthetic oligonucleotide
agcctcaaacctgtggctgtggg

SEQ ID NO: 1411 - DNA, 23 bp, Artificial Sequence
  Description of Artificial Sequence: Synthetic oligonucleotide
gctgaggaggccttgtctctggg

SEQ ID NO: 1412 - DNA, 23 bp, Artificial Sequence
  Description of Artificial Sequence: Synthetic oligonucleotide
ggctgtgggtcccagagacaagg

SEQ ID NO: 1413 - DNA, 23 bp, Artificial Sequence
  Description of Artificial Sequence: Synthetic oligonucleotide
tgctgaggaggccttgtctctgg

SEQ ID NO: 1414 - DNA, 23 bp, Artificial Sequence
  Description of Artificial Sequence: Synthetic oligonucleotide
atccttctctgatgctgaggagg

SEQ ID NO: 1415 - DNA, 23 bp, Artificial Sequence
  Description of Artificial Sequence: Synthetic oligonucleotide
ggcatccttctctgatgctgagg

SEQ ID NO: 1416 - DNA, 23 bp, Artificial Sequence
  Description of Artificial Sequence: Synthetic oligonucleotide
ggcctcctcagcatcagagaagg

SEQ ID NO: 1417 - DNA, 23 bp, Artificial Sequence
  Description of Artificial Sequence: Synthetic oligonucleotide
ggttgatgaccctgagacaaagg

SEQ ID NO: 1418 - DNA, 23 bp, Artificial Sequence
  Description of Artificial Sequence: Synthetic oligonucleotide
gagaaggatgcctttgtctcagg

SEQ ID NO: 1419 - DNA, 23 bp, Artificial Sequence
  Description of Artificial Sequence: Synthetic oligonucleotide
agaaggatgcctttgtctcaggg

SEQ ID NO: 1420 - DNA, 23 bp, Artificial Sequence
  Description of Artificial Sequence: Synthetic oligonucleotide
cagggtcatcaaccttctccagg

SEQ ID NO: 1421 - DNA, 23 bp, Artificial Sequence
  Description of Artificial Sequence: Synthetic oligonucleotide
gggggtgagcaacctggagaagg

SEQ ID NO: 1422 - DNA, 23 bp, Artificial Sequence
  Description of Artificial Sequence: Synthetic oligonucleotide
acagcagggggtgagcaacctgg

SEQ ID NO: 1423 - DNA, 23 bp, Artificial Sequence
  Description of Artificial Sequence: Synthetic oligonucleotide
gggatcccctttacagcaggggg

SEQ ID NO: 1424 - DNA, 23 bp, Artificial Sequence
  Description of Artificial Sequence: Synthetic oligonucleotide
ggggatcccctttacagcagggg

SEQ ID NO: 1425 - DNA, 23 bp, Artificial Sequence
  Description of Artificial Sequence: Synthetic oligonucleotide
tggggatcccctttacagcaggg

SEQ ID NO: 1426 - DNA, 23 bp, Artificial Sequence
  Description of Artificial Sequence: Synthetic oligonucleotide
ttggggatcccctttacagcagg

SEQ ID NO: 1427 - DNA, 23 bp, Artificial Sequence
  Description of Artificial Sequence: Synthetic oligonucleotide
ttgctcaccccctgctgtaaagg

SEQ ID NO: 1428 - DNA, 23 bp, Artificial Sequence
  Description of Artificial Sequence: Synthetic oligonucleotide
tgctcaccccctgctgtaaaggg

SEQ ID NO: 1429 - DNA, 23 bp, Artificial Sequence
  Description of Artificial Sequence: Synthetic oligonucleotide
gctcaccccctgctgtaaagggg

SEQ ID NO: 1430 - DNA, 23 bp, Artificial Sequence
  Description of Artificial Sequence: Synthetic oligonucleotide
ttgtctgatgagcggtcttgggg

SEQ ID NO: 1431 - DNA, 23 bp, Artificial Sequence
  Description of Artificial Sequence: Synthetic oligonucleotide
cttgtctgatgagcggtcttggg

SEQ ID NO: 1432 - DNA, 23 bp, Artificial Sequence
  Description of Artificial Sequence: Synthetic oligonucleotide
ccttgtctgatgagcggtcttgg

SEQ ID NO: 1433 - DNA, 23 bp, Artificial Sequence
  Description of Artificial Sequence: Synthetic oligonucleotide
caagctccttgtctgatgagcgg

SEQ ID NO: 1434 - DNA, 23 bp, Artificial Sequence
  Description of Artificial Sequence: Synthetic oligonucleotide
ccaagaccgctcatcagacaagg

SEQ ID NO: 1435 - DNA, 23 bp, Artificial Sequence
  Description of Artificial Sequence: Synthetic oligonucleotide
cgctcatcagacaaggagcttgg

SEQ ID NO: 1436 - DNA, 23 bp, Artificial Sequence
  Description of Artificial Sequence: Synthetic oligonucleotide
gctcatcagacaaggagcttggg

SEQ ID NO: 1437 - DNA, 23 bp, Artificial Sequence
  Description of Artificial Sequence: Synthetic oligonucleotide
gacaaggagcttgggaactgagg

SEQ ID NO: 1438 - DNA, 23 bp, Artificial Sequence
  Description of Artificial Sequence: Synthetic oligonucleotide
aggagacacagtcagcctccagg

SEQ ID NO: 1439 - DNA, 23 bp, Artificial Sequence
  Description of Artificial Sequence: Synthetic oligonucleotide
ggcattttgggcactcctggagg

SEQ ID NO: 1440 - DNA, 23 bp, Artificial Sequence
  Description of Artificial Sequence: Synthetic oligonucleotide
gagggcattttgggcactcctgg

SEQ ID NO: 1441 - DNA, 23 bp, Artificial Sequence
  Description of Artificial Sequence: Synthetic oligonucleotide
gcagcatgtgagggcattttggg

SEQ ID NO: 1442 - DNA, 23 bp, Artificial Sequence
  Description of Artificial Sequence: Synthetic oligonucleotide
tgcagcatgtgagggcattttgg

SEQ ID NO: 1443 - DNA, 23 bp, Artificial Sequence
  Description of Artificial Sequence: Synthetic oligonucleotide
aatctgtatgcagcatgtgaggg

SEQ ID NO: 1444 - DNA, 23 bp, Artificial Sequence
  Description of Artificial Sequence: Synthetic oligonucleotide
caatctgtatgcagcatgtgagg

SEQ ID NO: 1445 - DNA, 23 bp, Artificial Sequence
  Description of Artificial Sequence: Synthetic oligonucleotide
atgtggatgtactttatttgtgg

SEQ ID NO: 1446 - DNA, 23 bp, Artificial Sequence
  Description of Artificial Sequence: Synthetic oligonucleotide
aggacagagtcttcagaatgtgg

SEQ ID NO: 1447 - DNA, 23 bp, Artificial Sequence
  Description of Artificial Sequence: Synthetic oligonucleotide
ggccagcctggttggtgatgagg

SEQ ID NO: 1448 - DNA, 23 bp, Artificial Sequence
  Description of Artificial Sequence: Synthetic oligonucleotide
ctctgtcctcatcaccaaccagg

SEQ ID NO: 1449 - DNA, 23 bp, Artificial Sequence
  Description of Artificial Sequence: Synthetic oligonucleotide
tcaccaggggccagcctggttgg

SEQ ID NO: 1450 - DNA, 23 bp, Artificial Sequence
  Description of Artificial Sequence: Synthetic oligonucleotide
gtcctcatcaccaaccaggctgg

SEQ ID NO: 1451 - DNA, 23 bp, Artificial Sequence
  Description of Artificial Sequence: Synthetic oligonucleotide
gccctcaccaggggccagcctgg

SEQ ID NO: 1452 - DNA, 23 bp, Artificial Sequence
  Description of Artificial Sequence: Synthetic oligonucleotide
tcaccaaccaggctggcccctgg

SEQ ID NO: 1453 - DNA, 23 bp, Artificial Sequence
  Description of Artificial Sequence: Synthetic oligonucleotide
aaccaggctggcccctggtgagg

SEQ ID NO: 1454 - DNA, 23 bp, Artificial Sequence
  Description of Artificial Sequence: Synthetic oligonucleotide
accactacagccctcaccagggg

SEQ ID NO: 1455 - DNA, 23 bp, Artificial Sequence
  Description of Artificial Sequence: Synthetic oligonucleotide
accaggctggcccctggtgaggg

SEQ ID NO: 1456 - DNA, 23 bp, Artificial Sequence
  Description of Artificial Sequence: Synthetic oligonucleotide
aaccactacagccctcaccaggg

SEQ ID NO: 1457 - DNA, 23 bp, Artificial Sequence
  Description of Artificial Sequence: Synthetic oligonucleotide
caaccactacagccctcaccagg

SEQ ID NO: 1458 - DNA, 23 bp, Artificial Sequence
  Description of Artificial Sequence: Synthetic oligonucleotide
gcccctggtgagggctgtagtgg

SEQ ID NO: 1459 - DNA, 23 bp, Artificial Sequence
  Description of Artificial Sequence: Synthetic oligonucleotide
ggtgagggctgtagtggttgagg

SEQ ID NO: 1460 - DNA, 23 bp, Artificial Sequence
  Description of Artificial Sequence: Synthetic oligonucleotide
gtagtggttgaggcctttgttgg

SEQ ID NO: 1461 - DNA, 23 bp, Artificial Sequence
  Description of Artificial Sequence: Synthetic oligonucleotide
aacctactgtctaccaacaaagg

SEQ ID NO: 1462 - DNA, 23 bp, Artificial Sequence
  Description of Artificial Sequence: Synthetic oligonucleotide
ggcctttgttggtagacagtagg

SEQ ID NO: 1463 - DNA, 23 bp, Artificial Sequence
  Description of Artificial Sequence: Synthetic oligonucleotide
agcctcccaatagaaaatcatgg

SEQ ID NO: 1464 - DNA, 23 bp, Artificial Sequence
  Description of Artificial Sequence: Synthetic oligonucleotide
agcaagccatgattttctattgg

SEQ ID NO: 1465 - DNA, 23 bp, Artificial Sequence
  Description of Artificial Sequence: Synthetic oligonucleotide
gcaagccatgattttctattggg

SEQ ID NO: 1466 - DNA, 23 bp, Artificial Sequence
  Description of Artificial Sequence: Synthetic oligonucleotide
agccatgattttctattgggagg

SEQ ID NO: 1467 - DNA, 23 bp, Artificial Sequence
  Description of Artificial Sequence: Synthetic oligonucleotide
tcagctgtgtttccaagaccagg

SEQ ID NO: 1468 - DNA, 23 bp, Artificial Sequence
  Description of Artificial Sequence: Synthetic oligonucleotide
gctttctgccctcctggtcttgg

SEQ ID NO: 1469 - DNA, 23 bp, Artificial Sequence
  Description of Artificial Sequence: Synthetic oligonucleotide
gctgtgtttccaagaccaggagg

SEQ ID NO: 1470 - DNA, 23 bp, Artificial Sequence
  Description of Artificial Sequence: Synthetic oligonucleotide
ctgtgtttccaagaccaggaggg

SEQ ID NO: 1471 - DNA, 23 bp, Artificial Sequence
  Description of Artificial Sequence: Synthetic oligonucleotide
tggtttgctttctgccctcctgg

SEQ ID NO: 1472 - DNA, 23 bp, Artificial Sequence
  Description of Artificial Sequence: Synthetic oligonucleotide
ggcagaaagcaaaccatcccagg

SEQ ID NO: 1473 - DNA, 23 bp, Artificial Sequence
  Description of Artificial Sequence: Synthetic oligonucleotide
catggactgcttgcctgggatgg

SEQ ID NO: 1474 - DNA, 23 bp, Artificial Sequence
  Description of Artificial Sequence: Synthetic oligonucleotide
ggcccatggactgcttgcctggg

SEQ ID NO: 1475 - DNA, 23 bp, Artificial Sequence
  Description of Artificial Sequence: Synthetic oligonucleotide
tggcccatggactgcttgcctgg

SEQ ID NO: 1476 - DNA, 23 bp, Artificial Sequence
  Description of Artificial Sequence: Synthetic oligonucleotide
catcccaggcaagcagtccatgg

SEQ ID NO: 1477 - DNA, 23 bp, Artificial Sequence
  Description of Artificial Sequence: Synthetic oligonucleotide
atcccaggcaagcagtccatggg

SEQ ID NO: 1478 - DNA, 23 bp, Artificial Sequence
  Description of Artificial Sequence: Synthetic oligonucleotide
tagacatctgacatggcccatgg

SEQ ID NO: 1479 - DNA, 23 bp, Artificial Sequence
  Description of Artificial Sequence: Synthetic oligonucleotide
taacgtctagacatctgacatgg

SEQ ID NO: 1480 - DNA, 23 bp, Artificial Sequence
  Description of Artificial Sequence: Synthetic oligonucleotide
tgtcagatgtctagacgttatgg

SEQ ID NO: 1481 - DNA, 23 bp, Artificial Sequence
  Description of Artificial Sequence: Synthetic oligonucleotide
gtcagatgtctagacgttatggg

SEQ ID NO: 1482 - DNA, 23 bp, Artificial Sequence
  Description of Artificial Sequence: Synthetic oligonucleotide
atcatagtttccgagaggaatgg

SEQ ID NO: 1483 - DNA, 23 bp, Artificial Sequence
  Description of Artificial Sequence: Synthetic oligonucleotide
gtttgctctgccattcctctcgg

SEQ ID NO: 1484 - DNA, 23 bp, Artificial Sequence
  Description of Artificial Sequence: Synthetic oligonucleotide
agggcatcatagtttccgagagg

SEQ ID NO: 1485 - DNA, 23 bp, Artificial Sequence
  Description of Artificial Sequence: Synthetic oligonucleotide
ggaaactatgatgccctgtatgg

SEQ ID NO: 1486 - DNA, 23 bp, Artificial Sequence
  Description of Artificial Sequence: Synthetic oligonucleotide
gactgaaggtaaaccatacaggg

SEQ ID NO: 1487 - DNA, 23 bp, Artificial Sequence
  Description of Artificial Sequence: Synthetic oligonucleotide
tgactgaaggtaaaccatacagg

SEQ ID NO: 1488 - DNA, 23 bp, Artificial Sequence
  Description of Artificial Sequence: Synthetic oligonucleotide
ggccagtcacctgtgactgaagg

SEQ ID NO: 1489 - DNA, 23 bp, Artificial Sequence
  Description of Artificial Sequence: Synthetic oligonucleotide
tatggtttaccttcagtcacagg

SEQ ID NO: 1490 - DNA, 23 bp, Artificial Sequence
  Description of Artificial Sequence: Synthetic oligonucleotide
taccttcagtcacaggtgactgg

SEQ ID NO: 1491 - DNA, 23 bp, Artificial Sequence
  Description of Artificial Sequence: Synthetic oligonucleotide
gtcacaggtgactggcctacagg

SEQ ID NO: 1492 - DNA, 23 bp, Artificial Sequence
  Description of Artificial Sequence: Synthetic oligonucleotide
tcacaggtgactggcctacaggg

SEQ ID NO: 1493 - DNA, 23 bp, Artificial Sequence
  Description of Artificial Sequence: Synthetic oligonucleotide
ggaacaaggaatggccctgtagg

SEQ ID NO: 1494 - DNA, 23 bp, Artificial Sequence
  Description of Artificial Sequence: Synthetic oligonucleotide
gaagtcgttggaacaaggaatgg

SEQ ID NO: 1495 - DNA, 23 bp, Artificial Sequence
  Description of Artificial Sequence: Synthetic oligonucleotide
ctcgagaagtcgttggaacaagg

SEQ ID NO: 1496 - DNA, 23 bp, Artificial Sequence
  Description of Artificial Sequence: Synthetic oligonucleotide
aattatactcgagaagtcgttgg

SEQ ID NO: 1497 - DNA, 23 bp, Artificial Sequence
  Description of Artificial Sequence: Synthetic oligonucleotide
ctcgagtataattaatccccagg

SEQ ID NO: 1498 - DNA, 23 bp, Artificial Sequence
  Description of Artificial Sequence: Synthetic oligonucleotide
gctctggccgtaaatgcctgggg

SEQ ID NO: 1499 - DNA, 23 bp, Artificial Sequence
  Description of Artificial Sequence: Synthetic oligonucleotide
tgctctggccgtaaatgcctggg

SEQ ID NO: 1500 - DNA, 23 bp, Artificial Sequence
  Description of Artificial Sequence: Synthetic oligonucleotide
ctgctctggccgtaaatgcctgg

SEQ ID NO: 1501 - DNA, 23 bp, Artificial Sequence
  Description of Artificial Sequence: Synthetic oligonucleotide
aattaatccccaggcatttacgg

SEQ ID NO: 1502 - DNA, 23 bp, Artificial Sequence
  Description of Artificial Sequence: Synthetic oligonucleotide
acggatttggccggctgctctgg

SEQ ID NO: 1503 - DNA, 23 bp, Artificial Sequence
  Description of Artificial Sequence: Synthetic oligonucleotide
gcatttacggccagagcagccgg

SEQ ID NO: 1504 - DNA, 23 bp, Artificial Sequence
  Description of Artificial Sequence: Synthetic oligonucleotide
ctgcacttcacggatttggccgg

SEQ ID NO: 1505 - DNA, 23 bp, Artificial Sequence
  Description of Artificial Sequence: Synthetic oligonucleotide
accactgcacttcacggatttgg

SEQ ID NO: 1506 - DNA, 23 bp, Artificial Sequence
  Description of Artificial Sequence: Synthetic oligonucleotide
aaaacaaccactgcacttcacgg

SEQ ID NO: 1507 - DNA, 23 bp, Artificial Sequence
  Description of Artificial Sequence: Synthetic oligonucleotide
gccaaatccgtgaagtgcagtgg

SEQ ID NO: 1508 - DNA, 23 bp, Artificial Sequence
  Description of Artificial Sequence: Synthetic oligonucleotide
tttaaattatattaacttcttgg

SEQ ID NO: 1509 - DNA, 23 bp, Artificial Sequence
  Description of Artificial Sequence: Synthetic oligonucleotide
acttcttggaaacttattttagg

SEQ ID NO: 1510 - DNA, 23 bp, Artificial Sequence
  Description of Artificial Sequence: Synthetic oligonucleotide
cttcttggaaacttattttaggg

SEQ ID NO: 1511 - DNA, 23 bp, Artificial Sequence
  Description of Artificial Sequence: Synthetic oligonucleotide
ctaacatttttactcaagattgg

SEQ ID NO: 1512 - DNA, 23 bp, Artificial Sequence
  Description of Artificial Sequence: Synthetic oligonucleotide
tcttgagtaaaaatgttagaagg

SEQ ID NO: 1513 - DNA, 23 bp, Artificial Sequence
  Description of Artificial Sequence: Synthetic oligonucleotide
cttgagtaaaaatgttagaaggg

SEQ ID NO: 1514 - DNA, 23 bp, Artificial Sequence
  Description of Artificial Sequence: Synthetic oligonucleotide
gtaaaaatgttagaagggactgg

SEQ ID NO: 1515 - DNA, 23 bp, Artificial Sequence
  Description of Artificial Sequence: Synthetic oligonucleotide
aaaatgttagaagggactggtgg

SEQ ID NO: 1516 - DNA, 23 bp, Artificial Sequence
  Description of Artificial Sequence: Synthetic oligonucleotide
tatgtgtagggatgtctgggagg

SEQ ID NO: 1517 - DNA, 23 bp, Artificial Sequence
  Description of Artificial Sequence: Synthetic oligonucleotide
gtctatgtgtagggatgtctggg

SEQ ID NO: 1518 - DNA, 23 bp, Artificial Sequence
  Description of Artificial Sequence: Synthetic oligonucleotide
agtctatgtgtagggatgtctgg

SEQ ID NO: 1519 - DNA, 23 bp, Artificial Sequence
  Description of Artificial Sequence: Synthetic oligonucleotide
caacccaaagtctatgtgtaggg

SEQ ID NO: 1520 - DNA, 23 bp, Artificial Sequence
  Description of Artificial Sequence: Synthetic oligonucleotide
tcaacccaaagtctatgtgtagg

SEQ ID NO: 1521 - DNA, 23 bp, Artificial Sequence
  Description of Artificial Sequence: Synthetic oligonucleotide
acatccctacacatagactttgg

SEQ ID NO: 1522 - DNA, 23 bp, Artificial Sequence
  Description of Artificial Sequence: Synthetic oligonucleotide
catccctacacatagactttggg

SEQ ID NO: 1523 - DNA, 23 bp, Artificial Sequence
  Description of Artificial Sequence: Synthetic oligonucleotide
ttagaagaaagtttcaaggaagg

SEQ ID NO: 1524 - DNA, 23 bp, Artificial Sequence
  Description of Artificial Sequence: Synthetic oligonucleotide
taatttagaagaaagtttcaagg

SEQ ID NO: 1525 - DNA, 23 bp, Artificial Sequence
  Description of Artificial Sequence: Synthetic oligonucleotide
ttgaaactttcttctaaattagg

SEQ ID NO: 1526 - DNA, 23 bp, Artificial Sequence
  Description of Artificial Sequence: Synthetic oligonucleotide
gaaggtgcctaaattagggaagg

SEQ ID NO: 1527 - DNA, 23 bp, Artificial Sequence
  Description of Artificial Sequence: Synthetic oligonucleotide
ttaggtgccttccctaatttagg

SEQ ID NO: 1528 - DNA, 23 bp, Artificial Sequence
  Description of Artificial Sequence: Synthetic oligonucleotide
ctgggaaggtgcctaaattaggg

SEQ ID NO: 1529 - DNA, 23 bp, Artificial Sequence
  Description of Artificial Sequence: Synthetic oligonucleotide
actgggaaggtgcctaaattagg

SEQ ID NO: 1530 - DNA, 23 bp, Artificial Sequence
  Description of Artificial Sequence: Synthetic oligonucleotide
gtcacagactagtactgggaagg

SEQ ID NO: 1531 - DNA, 23 bp, Artificial Sequence
  Description of Artificial Sequence: Synthetic oligonucleotide
acaggtcacagactagtactggg

SEQ ID NO: 1532 - DNA, 23 bp, Artificial Sequence
  Description of Artificial Sequence: Synthetic oligonucleotide
aacaggtcacagactagtactgg

SEQ ID NO: 1533 - DNA, 23 bp, Artificial Sequence
  Description of Artificial Sequence: Synthetic oligonucleotide
gtactagtctgtgacctgttagg

SEQ ID NO: 1534 - DNA, 23 bp, Artificial Sequence
  Description of Artificial Sequence: Synthetic oligonucleotide
tgtgtggcctggttcctaacagg

SEQ ID NO: 1535 - DNA, 23 bp, Artificial Sequence
  Description of Artificial Sequence: Synthetic oligonucleotide
tctgtgacctgttaggaaccagg

SEQ ID NO: 1536 - DNA, 23 bp, Artificial Sequence
  Description of Artificial Sequence: Synthetic oligonucleotide
tcaactcctgctgtgtggcctgg

SEQ ID NO: 1537 - DNA, 23 bp, Artificial Sequence
  Description of Artificial Sequence: Synthetic oligonucleotide
taggaaccaggccacacagcagg

SEQ ID NO: 1538 - DNA, 23 bp, Artificial Sequence
  Description of Artificial Sequence: Synthetic oligonucleotide
gccactcaactcctgctgtgtgg

SEQ ID NO: 1539 - DNA, 23 bp, Artificial Sequence
  Description of Artificial Sequence: Synthetic oligonucleotide
gccacacagcaggagttgagtgg

SEQ ID NO: 1540 - DNA, 23 bp, Artificial Sequence
  Description of Artificial Sequence: Synthetic oligonucleotide
cacagcaggagttgagtggcagg

SEQ ID NO: 1541 - DNA, 23 bp, Artificial Sequence
  Description of Artificial Sequence: Synthetic oligonucleotide
acagcaggagttgagtggcaggg

SEQ ID NO: 1542 - DNA, 23 bp, Artificial Sequence
  Description of Artificial Sequence: Synthetic oligonucleotide
tctgacaggaggcggagctcagg

SEQ ID NO: 1543 - DNA, 23 bp, Artificial Sequence
  Description of Artificial Sequence: Synthetic oligonucleotide
actgctgatctgacaggaggcgg

SEQ ID NO: 1544 - DNA, 23 bp, Artificial Sequence
  Description of Artificial Sequence: Synthetic oligonucleotide
gccactgctgatctgacaggagg

SEQ ID NO: 1545 - DNA, 23 bp, Artificial Sequence
  Description of Artificial Sequence: Synthetic oligonucleotide
aatgccactgctgatctgacagg

SEQ ID NO: 1546 - DNA, 23 bp, Artificial Sequence
  Description of Artificial Sequence: Synthetic oligonucleotide
gcctcctgtcagatcagcagtgg

SEQ ID NO: 1547 - DNA, 23 bp, Artificial Sequence
  Description of Artificial Sequence: Synthetic oligonucleotide
gcacagttcacaatagtattcgg

SEQ ID NO: 1548 - DNA, 23 bp, Artificial Sequence
  Description of Artificial Sequence: Synthetic oligonucleotide
tattgtgaactgtgcgtgtaagg

SEQ ID NO: 1549 - DNA, 23 bp, Artificial Sequence
  Description of Artificial Sequence: Synthetic oligonucleotide
attgtgaactgtgcgtgtaaggg

SEQ ID NO: 1550 - DNA, 23 bp, Artificial Sequence
  Description of Artificial Sequence: Synthetic oligonucleotide
tcgggcattagattctcataagg

SEQ ID NO: 1551 - DNA, 23 bp, Artificial Sequence
  Description of Artificial Sequence: Synthetic oligonucleotide
tatgagaatctaatgcccgatgg

SEQ ID NO: 1552 - DNA, 23 bp, Artificial Sequence
  Description of Artificial Sequence: Synthetic oligonucleotide
ctcttccatctcagaccatcggg

SEQ ID NO: 1553 - DNA, 23 bp, Artificial Sequence
  Description of Artificial Sequence: Synthetic oligonucleotide
actcttccatctcagaccatcgg

SEQ ID NO: 1554 - DNA, 23 bp, Artificial Sequence
  Description of Artificial Sequence: Synthetic oligonucleotide
taatgcccgatggtctgagatgg

SEQ ID NO: 1555 - DNA, 23 bp, Artificial Sequence
  Description of Artificial Sequence: Synthetic oligonucleotide
gcagggggaaggggtggttttgg

SEQ ID NO: 1556 - DNA, 23 bp, Artificial Sequence
  Description of Artificial Sequence: Synthetic oligonucleotide
atggtggcagggggaaggggtgg

SEQ ID NO: 1557 - DNA, 23 bp, Artificial Sequence
  Description of Artificial Sequence: Synthetic oligonucleotide
cagatggtggcagggggaagggg

SEQ ID NO: 1558 - DNA, 23 bp, Artificial Sequence
  Description of Artificial Sequence: Synthetic oligonucleotide
ccagatggtggcagggggaaggg

SEQ ID NO: 1559 - DNA, 23 bp, Artificial Sequence
  Description of Artificial Sequence: Synthetic oligonucleotide
cccagatggtggcagggggaagg

SEQ ID NO: 1560 - DNA, 23 bp, Artificial Sequence
  Description of Artificial Sequence: Synthetic oligonucleotide
tttccccagatggtggcaggggg

SEQ ID NO: 1561 - DNA, 23 bp, Artificial Sequence
  Description of Artificial Sequence: Synthetic oligonucleotide
atttccccagatggtggcagggg

SEQ ID NO: 1562 - DNA, 23 bp, Artificial Sequence
  Description of Artificial Sequence: Synthetic oligonucleotide
tatttccccagatggtggcaggg

SEQ ID NO: 1563 - DNA, 23 bp, Artificial Sequence
  Description of Artificial Sequence: Synthetic oligonucleotide
atatttccccagatggtggcagg

SEQ ID NO: 1564 - DNA, 23 bp, Artificial Sequence
  Description of Artificial Sequence: Synthetic oligonucleotide
cccttccccctgccaccatctgg

SEQ ID NO: 1565 - DNA, 23 bp, Artificial Sequence
  Description of Artificial Sequence: Synthetic oligonucleotide
ccttccccctgccaccatctggg

SEQ ID NO: 1566 - DNA, 23 bp, Artificial Sequence
  Description of Artificial Sequence: Synthetic oligonucleotide
gacaatatttccccagatggtgg

SEQ ID NO: 1567 - DNA, 23 bp, Artificial Sequence
  Description of Artificial Sequence: Synthetic oligonucleotide
cttccccctgccaccatctgggg

SEQ ID NO: 1568 - DNA, 23 bp, Artificial Sequence
  Description of Artificial Sequence: Synthetic oligonucleotide
gtagacaatatttccccagatgg

SEQ ID NO: 1569 - DNA, 23 bp, Artificial Sequence
  Description of Artificial Sequence: Synthetic oligonucleotide
ggcaccagggatcagtttcgtgg

SEQ ID NO: 1570 - DNA, 23 bp, Artificial Sequence
  Description of Artificial Sequence: Synthetic oligonucleotide
tctaccacgaaactgatccctgg

SEQ ID NO: 1571 - DNA, 23 bp, Artificial Sequence
  Description of Artificial Sequence: Synthetic oligonucleotide
ccccaacctttttggcaccaggg

SEQ ID NO: 1572 - DNA, 23 bp, Artificial Sequence
  Description of Artificial Sequence: Synthetic oligonucleotide
tccccaacctttttggcaccagg

SEQ ID NO: 1573 - DNA, 23 bp, Artificial Sequence
  Description of Artificial Sequence: Synthetic oligonucleotide
actgatccctggtgccaaaaagg

SEQ ID NO: 1574 - DNA, 23 bp, Artificial Sequence
  Description of Artificial Sequence: Synthetic oligonucleotide
acagcggtccccaacctttttgg

SEQ ID NO: 1575 - DNA, 23 bp, Artificial Sequence
  Description of Artificial Sequence: Synthetic oligonucleotide
atccctggtgccaaaaaggttgg

SEQ ID NO: 1576 - DNA, 23 bp, Artificial Sequence
  Description of Artificial Sequence: Synthetic oligonucleotide
tccctggtgccaaaaaggttggg

SEQ ID NO: 1577 - DNA, 23 bp, Artificial Sequence
  Description of Artificial Sequence: Synthetic oligonucleotide
ccctggtgccaaaaaggttgggg

SEQ ID NO: 1578 - DNA, 23 bp, Artificial Sequence
  Description of Artificial Sequence: Synthetic oligonucleotide
aagcagatcccttaggacagcgg

SEQ ID NO: 1579 - DNA, 23 bp, Artificial Sequence
  Description of Artificial Sequence: Synthetic oligonucleotide
ggttggggaccgctgtcctaagg

SEQ ID NO: 1580 - DNA, 23 bp, Artificial Sequence
  Description of Artificial Sequence: Synthetic oligonucleotide
gttggggaccgctgtcctaaggg

SEQ ID NO: 1581 - DNA, 23 bp, Artificial Sequence
  Description of Artificial Sequence: Synthetic oligonucleotide
tcagaaaaagcagatcccttagg

SEQ ID NO: 1582 - DNA, 23 bp, Artificial Sequence
  Description of Artificial Sequence: Synthetic oligonucleotide
gatctgctttttctgacctgagg

SEQ ID NO: 1583 - DNA, 23 bp, Artificial Sequence
  Description of Artificial Sequence: Synthetic oligonucleotide
gtctaataaagaaaaacctcagg

SEQ ID NO: 1584 - DNA, 23 bp, Artificial Sequence
  Description of Artificial Sequence: Synthetic oligonucleotide
tttctttattagactgtatctgg

SEQ ID NO: 1585 - DNA, 23 bp, Artificial Sequence
  Description of Artificial Sequence: Synthetic oligonucleotide
tattagactgtatctggctgagg

SEQ ID NO: 1586 - DNA, 23 bp, Artificial Sequence
  Description of Artificial Sequence: Synthetic oligonucleotide
ctgttccgattaaaggcttcagg

SEQ ID NO: 1587 - DNA, 23 bp, Artificial Sequence
  Description of Artificial Sequence: Synthetic oligonucleotide
agaagcctgaagcctttaatcgg

SEQ ID NO: 1588 - DNA, 23 bp, Artificial Sequence
  Description of Artificial Sequence: Synthetic oligonucleotide
gccaaagctgttccgattaaagg

SEQ ID NO: 1589 - DNA, 23 bp, Artificial Sequence
  Description of Artificial Sequence: Synthetic oligonucleotide
gcctttaatcggaacagctttgg

SEQ ID NO: 1590 - DNA, 23 bp, Artificial Sequence
  Description of Artificial Sequence: Synthetic oligonucleotide
agattcagaaaccaacagattgg

SEQ ID NO: 1591 - DNA, 23 bp, Artificial Sequence
  Description of Artificial Sequence: Synthetic oligonucleotide
catagaaaagaccaatctgttgg

SEQ ID NO: 1592 - DNA, 23 bp, Artificial Sequence
  Description of Artificial Sequence: Synthetic oligonucleotide
cagattggtcttttctatgcagg

SEQ ID NO: 1593 - DNA, 23 bp, Artificial Sequence
  Description of Artificial Sequence: Synthetic oligonucleotide
agattggtcttttctatgcaggg

SEQ ID NO: 1594 - DNA, 23 bp, Artificial Sequence
  Description of Artificial Sequence: Synthetic oligonucleotide
ttttctatgcagggaagcctagg

SEQ ID NO: 1595 - DNA, 23 bp, Artificial Sequence
  Description of Artificial Sequence: Synthetic oligonucleotide
atgcagggaagcctaggaactgg

SEQ ID NO: 1596 - DNA, 23 bp, Artificial Sequence
  Description of Artificial Sequence: Synthetic oligonucleotide
gccatagccccccagttcctagg

SEQ ID NO: 1597 - DNA, 23 bp, Artificial Sequence
  Description of Artificial Sequence: Synthetic oligonucleotide
tgcagggaagcctaggaactggg

SEQ ID NO: 1598 - DNA, 23 bp, Artificial Sequence
  Description of Artificial Sequence: Synthetic oligonucleotide
gcagggaagcctaggaactgggg

SEQ ID NO: 1599 - DNA, 23 bp, Artificial Sequence
  Description of Artificial Sequence: Synthetic oligonucleotide
cagggaagcctaggaactggggg

SEQ ID NO: 1600 - DNA, 23 bp, Artificial Sequence
  Description of Artificial Sequence: Synthetic oligonucleotide
agggaagcctaggaactgggggg

SEQ ID NO: 1601 - DNA, 23 bp, Artificial Sequence
  Description of Artificial Sequence: Synthetic oligonucleotide
gcctaggaactggggggctatgg

SEQ ID NO: 1602 - DNA, 23 bp, Artificial Sequence
  Description of Artificial Sequence: Synthetic oligonucleotide
aggaactggggggctatggctgg

SEQ ID NO: 1603 - DNA, 23 bp, Artificial Sequence
  Description of Artificial Sequence: Synthetic oligonucleotide
ggaactggggggctatggctggg

SEQ ID NO: 1604 - DNA, 23 bp, Artificial Sequence
  Description of Artificial Sequence: Synthetic oligonucleotide
gaaaggatggaaacaataggggg

SEQ ID NO: 1605 - DNA, 23 bp, Artificial Sequence
  Description of Artificial Sequence: Synthetic oligonucleotide
ggaaaggatggaaacaatagggg

SEQ ID NO: 1606 - DNA, 23 bp, Artificial Sequence
  Description of Artificial Sequence: Synthetic oligonucleotide
aggaaaggatggaaacaataggg

SEQ ID NO: 1607 - DNA, 23 bp, Artificial Sequence
  Description of Artificial Sequence: Synthetic oligonucleotide
taggaaaggatggaaacaatagg

SEQ ID NO: 1608 - DNA, 23 bp, Artificial Sequence
  Description of Artificial Sequence: Synthetic oligonucleotide
aggatgaacataggaaaggatgg

SEQ ID NO: 1609 - DNA, 23 bp, Artificial Sequence
  Description of Artificial Sequence: Synthetic oligonucleotide
ctccaggatgaacataggaaagg

SEQ ID NO: 1610 - DNA, 23 bp, Artificial Sequence
  Description of Artificial Sequence: Synthetic oligonucleotide
cattcctccaggatgaacatagg

SEQ ID NO: 1611 - DNA, 23 bp, Artificial Sequence
  Description of Artificial Sequence: Synthetic oligonucleotide
atcctttcctatgttcatcctgg

SEQ ID NO: 1612 - DNA, 23 bp, Artificial Sequence
  Description of Artificial Sequence: Synthetic oligonucleotide
ctttcctatgttcatcctggagg

SEQ ID NO: 1613 - DNA, 23 bp, Artificial Sequence
  Description of Artificial Sequence: Synthetic oligonucleotide
gggtctgatgccattcctccagg

SEQ ID NO: 1614 - DNA, 23 bp, Artificial Sequence
  Description of Artificial Sequence: Synthetic oligonucleotide
ctatgttcatcctggaggaatgg

SEQ ID NO: 1615 - DNA, 23 bp, Artificial Sequence
  Description of Artificial Sequence: Synthetic oligonucleotide
gggagcaatcacagaggcatggg

SEQ ID NO: 1616 - DNA, 23 bp, Artificial Sequence
  Description of Artificial Sequence: Synthetic oligonucleotide
tgggagcaatcacagaggcatgg

SEQ ID NO: 1617 - DNA, 23 bp, Artificial Sequence
  Description of Artificial Sequence: Synthetic oligonucleotide
tgggctgggagcaatcacagagg

SEQ ID NO: 1618 - DNA, 23 bp, Artificial Sequence
  Description of Artificial Sequence: Synthetic oligonucleotide
atgctgtggttggatgggctggg

SEQ ID NO: 1619 - DNA, 23 bp, Artificial Sequence
  Description of Artificial Sequence: Synthetic oligonucleotide
gatgctgtggttggatgggctgg

SEQ ID NO: 1620 - DNA, 23 bp, Artificial Sequence
  Description of Artificial Sequence: Synthetic oligonucleotide
catagatgctgtggttggatggg

SEQ ID NO: 1621 - DNA, 23 bp, Artificial Sequence
  Description of Artificial Sequence: Synthetic oligonucleotide
acatagatgctgtggttggatgg

SEQ ID NO: 1622 - DNA, 23 bp, Artificial Sequence
  Description of Artificial Sequence: Synthetic oligonucleotide
cagaacatagatgctgtggttgg

SEQ ID NO: 1623 - DNA, 23 bp, Artificial Sequence
  Description of Artificial Sequence: Synthetic oligonucleotide
caggcagaacatagatgctgtgg

SEQ ID NO: 1624 - DNA, 23 bp, Artificial Sequence
  Description of Artificial Sequence: Synthetic oligonucleotide
cacagcatctatgttctgcctgg

SEQ ID NO: 1625 - DNA, 23 bp, Artificial Sequence
  Description of Artificial Sequence: Synthetic oligonucleotide
acagcatctatgttctgcctggg

SEQ ID NO: 1626 - DNA, 23 bp, Artificial Sequence
  Description of Artificial Sequence: Synthetic oligonucleotide
tctatgttctgcctgggaccagg

SEQ ID NO: 1627 - DNA, 23 bp, Artificial Sequence
  Description of Artificial Sequence: Synthetic oligonucleotide
tgctccctggccctggtcccagg

SEQ ID NO: 1628 - DNA, 23 bp, Artificial Sequence
  Description of Artificial Sequence: Synthetic oligonucleotide
ctatgttctgcctgggaccaggg

SEQ ID NO: 1629 - DNA, 23 bp, Artificial Sequence
  Description of Artificial Sequence: Synthetic oligonucleotide
ttctgcctgggaccagggccagg

SEQ ID NO: 1630 - DNA, 23 bp, Artificial Sequence
  Description of Artificial Sequence: Synthetic oligonucleotide
tctgcctgggaccagggccaggg

SEQ ID NO: 1631 - DNA, 23 bp, Artificial Sequence
  Description of Artificial Sequence: Synthetic oligonucleotide
tgtgccatgctccctggccctgg

SEQ ID NO: 1632 - DNA, 23 bp, Artificial Sequence
  Description of Artificial Sequence: Synthetic oligonucleotide
gctcagtgtgccatgctccctgg

SEQ ID NO: 1633 - DNA, 23 bp, Artificial Sequence
  Description of Artificial Sequence: Synthetic oligonucleotide
gggaccagggccagggagcatgg

SEQ ID NO: 1634 - DNA, 23 bp, Artificial Sequence
  Description of Artificial Sequence: Synthetic oligonucleotide
ggcacactgagctgagtataagg

SEQ ID NO: 1635 - DNA, 23 bp, Artificial Sequence
  Description of Artificial Sequence: Synthetic oligonucleotide
tgagctgagtataaggagagtgg

SEQ ID NO: 1636 - DNA, 23 bp, Artificial Sequence
  Description of Artificial Sequence: Synthetic oligonucleotide
gagtataaggagagtggagcagg

SEQ ID NO: 1637 - DNA, 23 bp, Artificial Sequence
  Description of Artificial Sequence: Synthetic oligonucleotide
aaaattttctgggctggcagtgg

SEQ ID NO: 1638 - DNA, 23 bp, Artificial Sequence
  Description of Artificial Sequence: Synthetic oligonucleotide
ttgaccaaaattttctgggctgg

SEQ ID NO: 1639 - DNA, 23 bp, Artificial Sequence
  Description of Artificial Sequence: Synthetic oligonucleotide
aactttgaccaaaattttctggg

SEQ ID NO: 1640 - DNA, 23 bp, Artificial Sequence
  Description of Artificial Sequence: Synthetic oligonucleotide
caactttgaccaaaattttctgg

SEQ ID NO: 1641 - DNA, 23 bp, Artificial Sequence
  Description of Artificial Sequence: Synthetic oligonucleotide
actgccagcccagaaaattttgg

SEQ ID NO: 1642 - DNA, 23 bp, Artificial Sequence
  Description of Artificial Sequence: Synthetic oligonucleotide
tcgaaggctgagaagatttcagg

SEQ ID NO: 1643 - DNA, 23 bp, Artificial Sequence
  Description of Artificial Sequence: Synthetic oligonucleotide
agagagcagctgtgaatcgaagg

SEQ ID NO: 1644 - DNA, 23 bp, Artificial Sequence
  Description of Artificial Sequence: Synthetic oligonucleotide
ggctgggaaggtgtcaaagctgg

SEQ ID NO: 1645 - DNA, 23 bp, Artificial Sequence
  Description of Artificial Sequence: Synthetic oligonucleotide
cagcagcctgtgggctgggaagg

SEQ ID NO: 1646 - DNA, 23 bp, Artificial Sequence
  Description of Artificial Sequence: Synthetic oligonucleotide
agtgcagcagcctgtgggctggg

SEQ ID NO: 1647 - DNA, 23 bp, Artificial Sequence
  Description of Artificial Sequence: Synthetic oligonucleotide
ttgacaccttcccagcccacagg

SEQ ID NO: 1648 - DNA, 23 bp, Artificial Sequence
  Description of Artificial Sequence: Synthetic oligonucleotide
cagtgcagcagcctgtgggctgg

SEQ ID NO: 1649 - DNA, 23 bp, Artificial Sequence
  Description of Artificial Sequence: Synthetic oligonucleotide
gccccagtgcagcagcctgtggg

SEQ ID NO: 1650 - DNA, 23 bp, Artificial Sequence
  Description of Artificial Sequence: Synthetic oligonucleotide
agccccagtgcagcagcctgtgg

SEQ ID NO: 1651 - DNA, 23 bp, Artificial Sequence
  Description of Artificial Sequence: Synthetic oligonucleotide
cagcccacaggctgctgcactgg

SEQ ID NO: 1652 - DNA, 23 bp, Artificial Sequence
  Description of Artificial Sequence: Synthetic oligonucleotide
agcccacaggctgctgcactggg

SEQ ID NO: 1653 - DNA, 23 bp, Artificial Sequence
  Description of Artificial Sequence: Synthetic oligonucleotide
gcccacaggctgctgcactgggg

SEQ ID NO: 1654 - DNA, 23 bp, Artificial Sequence
  Description of Artificial Sequence: Synthetic oligonucleotide
ggctgctgcactggggctgaagg

SEQ ID NO: 1655 - DNA, 23 bp, Artificial Sequence
  Description of Artificial Sequence: Synthetic oligonucleotide
ctgcactggggctgaaggcgtgg

SEQ ID NO: 1656 - DNA, 23 bp, Artificial Sequence
  Description of Artificial Sequence: Synthetic oligonucleotide
gtcactctctaggtgtgcagggg

SEQ ID NO: 1657 - DNA, 23 bp, Artificial Sequence
  Description of Artificial Sequence: Synthetic oligonucleotide
tgtcactctctaggtgtgcaggg

SEQ ID NO: 1658 - DNA, 23 bp, Artificial Sequence
  Description of Artificial Sequence: Synthetic oligonucleotide
ctgtcactctctaggtgtgcagg

SEQ ID NO: 1659 - DNA, 23 bp, Artificial Sequence
  Description of Artificial Sequence: Synthetic oligonucleotide
tggcatctctgtcactctctagg

SEQ ID NO: 1660 - DNA, 23 bp, Artificial Sequence
  Description of Artificial Sequence: Synthetic oligonucleotide
gagtgacagagatgccagactgg

SEQ ID NO: 1661 - DNA, 23 bp, Artificial Sequence
  Description of Artificial Sequence: Synthetic oligonucleotide
agtgacagagatgccagactggg

SEQ ID NO: 1662 - DNA, 23 bp, Artificial Sequence
  Description of Artificial Sequence: Synthetic oligonucleotide
tgccttcctgctgcccagtctgg

SEQ ID NO: 1663 - DNA, 23 bp, Artificial Sequence
  Description of Artificial Sequence: Synthetic oligonucleotide
gagatgccagactgggcagcagg

SEQ ID NO: 1664 - DNA, 23 bp, Artificial Sequence
  Description of Artificial Sequence: Synthetic oligonucleotide
tgccagactgggcagcaggaagg

SEQ ID NO: 1665 - DNA, 23 bp, Artificial Sequence
  Description of Artificial Sequence: Synthetic oligonucleotide
ctgggcagcaggaaggcaagagg

SEQ ID NO: 1666 - DNA, 23 bp, Artificial Sequence
  Description of Artificial Sequence: Synthetic oligonucleotide
aggattaagagagagcttcctgg

SEQ ID NO: 1667 - DNA, 23 bp, Artificial Sequence
  Description of Artificial Sequence: Synthetic oligonucleotide
accgagtgtggctttcagccagg

SEQ ID NO: 1668 - DNA, 23 bp, Artificial Sequence
  Description of Artificial Sequence: Synthetic oligonucleotide
tcctggctgaaagccacactcgg

SEQ ID NO: 1669 - DNA, 23 bp, Artificial Sequence
  Description of Artificial Sequence: Synthetic oligonucleotide
ttttcctggttaaccgagtgtgg

SEQ ID NO: 1670 - DNA, 23 bp, Artificial Sequence
  Description of Artificial Sequence: Synthetic oligonucleotide
aaagccacactcggttaaccagg

SEQ ID NO: 1671 - DNA, 23 bp, Artificial Sequence
  Description of Artificial Sequence: Synthetic oligonucleotide
tcgtgccaagggctttttcctgg

SEQ ID NO: 1672 - DNA, 23 bp, Artificial Sequence
  Description of Artificial Sequence: Synthetic oligonucleotide
gttaaccaggaaaaagcccttgg

SEQ ID NO: 1673 - DNA, 23 bp, Artificial Sequence
  Description of Artificial Sequence: Synthetic oligonucleotide
actgagtcttctcgtgccaaggg

SEQ ID NO: 1674 - DNA, 23 bp, Artificial Sequence
  Description of Artificial Sequence: Synthetic oligonucleotide
cactgagtcttctcgtgccaagg

SEQ ID NO: 1675 - DNA, 23 bp, Artificial Sequence
  Description of Artificial Sequence: Synthetic oligonucleotide
cttggcacgagaagactcagtgg

SEQ ID NO: 1676 - DNA, 23 bp, Artificial Sequence
  Description of Artificial Sequence: Synthetic oligonucleotide
cgagaagactcagtggcctgagg

SEQ ID NO: 1677 - DNA, 23 bp, Artificial Sequence
  Description of Artificial Sequence: Synthetic oligonucleotide
gagaagactcagtggcctgaggg

SEQ ID NO: 1678 - DNA, 23 bp, Artificial Sequence
  Description of Artificial Sequence: Synthetic oligonucleotide
caaccaaggctcagtccctcagg

SEQ ID NO: 1679 - DNA, 23 bp, Artificial Sequence
  Description of Artificial Sequence: Synthetic oligonucleotide
tggcctgagggactgagccttgg

SEQ ID NO: 1680 - DNA, 23 bp, Artificial Sequence
  Description of Artificial Sequence: Synthetic oligonucleotide
cagcacatgcccaacaaccaagg

SEQ ID NO: 1681 - DNA, 23 bp, Artificial Sequence
  Description of Artificial Sequence: Synthetic oligonucleotide
agggactgagccttggttgttgg

SEQ ID NO: 1682 - DNA, 23 bp, Artificial Sequence
  Description of Artificial Sequence: Synthetic oligonucleotide
gggactgagccttggttgttggg

SEQ ID NO: 1683 - DNA, 23 bp, Artificial Sequence
  Description of Artificial Sequence: Synthetic oligonucleotide
actctactgtcacacatggatgg

SEQ ID NO: 1684 - DNA, 23 bp, Artificial Sequence
  Description of Artificial Sequence: Synthetic oligonucleotide
ctacactctactgtcacacatgg

SEQ ID NO: 1685 - DNA, 23 bp, Artificial Sequence
  Description of Artificial Sequence: Synthetic oligonucleotide
cacccatgtcccacagtggctgg

SEQ ID NO: 1686 - DNA, 23 bp, Artificial Sequence
  Description of Artificial Sequence: Synthetic oligonucleotide
agagtgtagtccagccactgtgg

SEQ ID NO: 1687 - DNA, 23 bp, Artificial Sequence
  Description of Artificial Sequence: Synthetic oligonucleotide
gagtgtagtccagccactgtggg

SEQ ID NO: 1688 - DNA, 23 bp, Artificial Sequence
  Description of Artificial Sequence: Synthetic oligonucleotide
tcagcacccatgtcccacagtgg

SEQ ID NO: 1689 - DNA, 23 bp, Artificial Sequence
  Description of Artificial Sequence: Synthetic oligonucleotide
agtccagccactgtgggacatgg

SEQ ID NO: 1690 - DNA, 23 bp, Artificial Sequence
  Description of Artificial Sequence: Synthetic oligonucleotide
gtccagccactgtgggacatggg

SEQ ID NO: 1691 - DNA, 23 bp, Artificial Sequence
  Description of Artificial Sequence: Synthetic oligonucleotide
atgggtgctgaaagaccacatgg

SEQ ID NO: 1692 - DNA, 23 bp, Artificial Sequence
  Description of Artificial Sequence: Synthetic oligonucleotide
actcactgttcctctccatgtgg

SEQ ID NO: 1693 - DNA, 23 bp, Artificial Sequence
  Description of Artificial Sequence: Synthetic oligonucleotide
tgctgaaagaccacatggagagg

SEQ ID NO: 1694 - DNA, 23 bp, Artificial Sequence
  Description of Artificial Sequence: Synthetic oligonucleotide
aggaacagtgagtgctgacaagg

SEQ ID NO: 1695 - DNA, 23 bp, Artificial Sequence
  Description of Artificial Sequence: Synthetic oligonucleotide
ggaacagtgagtgctgacaaggg

SEQ ID NO: 1696 - DNA, 23 bp, Artificial Sequence
  Description of Artificial Sequence: Synthetic oligonucleotide
gggtgtctccaaagtgatcaagg

SEQ ID NO: 1697 - DNA, 23 bp, Artificial Sequence
  Description of Artificial Sequence: Synthetic oligonucleotide
agggctagccttgatcactttgg

SEQ ID NO: 1698 - DNA, 23 bp, Artificial Sequence
  Description of Artificial Sequence: Synthetic oligonucleotide
tgacatctagaagacacaggggg

SEQ ID NO: 1699 - DNA, 23 bp, Artificial Sequence
  Description of Artificial Sequence: Synthetic oligonucleotide
ctgacatctagaagacacagggg

SEQ ID NO: 1700 - DNA, 23 bp, Artificial Sequence
  Description of Artificial Sequence: Synthetic oligonucleotide
tctgacatctagaagacacaggg

SEQ ID NO: 1701 - DNA, 23 bp, Artificial Sequence
  Description of Artificial Sequence: Synthetic oligonucleotide
gtctgacatctagaagacacagg

SEQ ID NO: 1702 - DNA, 23 bp, Artificial Sequence
  Description of Artificial Sequence: Synthetic oligonucleotide
tggaggatagcagacagatttgg

SEQ ID NO: 1703 - DNA, 23 bp, Artificial Sequence
  Description of Artificial Sequence: Synthetic oligonucleotide
tcttgaaaatgcacgtttggagg

SEQ ID NO: 1704 - DNA, 23 bp, Artificial Sequence
  Description of Artificial Sequence: Synthetic oligonucleotide
tgctcttgaaaatgcacgtttgg

SEQ ID NO: 1705 - DNA, 23 bp, Artificial Sequence
  Description of Artificial Sequence: Synthetic oligonucleotide
acgtgcattttcaagagcaatgg

SEQ ID NO: 1706 - DNA, 23 bp, Artificial Sequence
  Description of Artificial Sequence: Synthetic oligonucleotide
ttttcaagagcaatggaaaaagg

SEQ ID NO: 1707 - DNA, 23 bp, Artificial Sequence
  Description of Artificial Sequence: Synthetic oligonucleotide
aagagcaatggaaaaaggattgg

SEQ ID NO: 1708 - DNA, 23 bp, Artificial Sequence
  Description of Artificial Sequence: Synthetic oligonucleotide
ggaaaaaggattggacttgatgg

SEQ ID NO: 1709 - DNA, 23 bp, Artificial Sequence
  Description of Artificial Sequence: Synthetic oligonucleotide
tggaatgcagcaagagtcctagg

SEQ ID NO: 1710 - DNA, 23 bp, Artificial Sequence
  Description of Artificial Sequence: Synthetic oligonucleotide
aggtaggtagtaacagacctagg

SEQ ID NO: 1711 - DNA, 23 bp, Artificial Sequence
  Description of Artificial Sequence: Synthetic oligonucleotide
agtttcttaaggtcataggtagg

SEQ ID NO: 1712 - DNA, 23 bp, Artificial Sequence
  Description of Artificial Sequence: Synthetic oligonucleotide
aaggagtttcttaaggtcatagg

SEQ ID NO: 1713 - DNA, 23 bp, Artificial Sequence
  Description of Artificial Sequence: Synthetic oligonucleotide
aggggtgaaggagtttcttaagg

SEQ ID NO: 1714 - DNA, 23 bp, Artificial Sequence
  Description of Artificial Sequence: Synthetic oligonucleotide
gtaagggttctgaggggtgaagg

SEQ ID NO: 1715 - DNA, 23 bp, Artificial Sequence
  Description of Artificial Sequence: Synthetic oligonucleotide
aaagctgtaagggttctgagggg

SEQ ID NO: 1716 - DNA, 23 bp, Artificial Sequence
  Description of Artificial Sequence: Synthetic oligonucleotide
gaaagctgtaagggttctgaggg

SEQ ID NO: 1717 - DNA, 23 bp, Artificial Sequence
  Description of Artificial Sequence: Synthetic oligonucleotide
agaaagctgtaagggttctgagg

SEQ ID NO: 1718 - DNA, 23 bp, Artificial Sequence
  Description of Artificial Sequence: Synthetic oligonucleotide
aatcagaaagaaagctgtaaggg

SEQ ID NO: 1719 - DNA, 23 bp, Artificial Sequence
  Description of Artificial Sequence: Synthetic oligonucleotide
gaatcagaaagaaagctgtaagg

SEQ ID NO: 1720 - DNA, 23 bp, Artificial Sequence
  Description of Artificial Sequence: Synthetic oligonucleotide
agcttggagtagagtaactcagg

SEQ ID NO: 1721 - DNA, 23 bp, Artificial Sequence
  Description of Artificial Sequence: Synthetic oligonucleotide
taagcagaaaagtctcagcttgg

SEQ ID NO: 1722 - DNA, 23 bp, Artificial Sequence
  Description of Artificial Sequence: Synthetic oligonucleotide
ggttgggggtttaggaggaaggg

SEQ ID NO: 1723 - DNA, 23 bp, Artificial Sequence
  Description of Artificial Sequence: Synthetic oligonucleotide
aggttgggggtttaggaggaagg

SEQ ID NO: 1724 - DNA, 23 bp, Artificial Sequence
  Description of Artificial Sequence: Synthetic oligonucleotide
atggaggttgggggtttaggagg

SEQ ID NO: 1725 - DNA, 23 bp, Artificial Sequence
  Description of Artificial Sequence: Synthetic oligonucleotide
gaaatggaggttgggggtttagg

SEQ ID NO: 1726 - DNA, 23 bp, Artificial Sequence
  Description of Artificial Sequence: Synthetic oligonucleotide
ccaggagaaatggaggttggggg

SEQ ID NO: 1727 - DNA, 23 bp, Artificial Sequence
  Description of Artificial Sequence: Synthetic oligonucleotide
accaggagaaatggaggttgggg

SEQ ID NO: 1728 - DNA, 23 bp, Artificial Sequence
  Description of Artificial Sequence: Synthetic oligonucleotide
caccaggagaaatggaggttggg

SEQ ID NO: 1729 - DNA, 23 bp, Artificial Sequence
  Description of Artificial Sequence: Synthetic oligonucleotide
acaccaggagaaatggaggttgg

SEQ ID NO: 1730 - DNA, 23 bp, Artificial Sequence
  Description of Artificial Sequence: Synthetic oligonucleotide
aaagacaccaggagaaatggagg

SEQ ID NO: 1731 - DNA, 23 bp, Artificial Sequence
  Description of Artificial Sequence: Synthetic oligonucleotide
aagaaagacaccaggagaaatgg

SEQ ID NO: 1732 - DNA, 23 bp, Artificial Sequence
  Description of Artificial Sequence: Synthetic oligonucleotide
cccccaacctccatttctcctgg

SEQ ID NO: 1733 - DNA, 23 bp, Artificial Sequence
  Description of Artificial Sequence: Synthetic oligonucleotide
ggtgtgtaaagaaagacaccagg

SEQ ID NO: 1734 - DNA, 23 bp, Artificial Sequence
  Description of Artificial Sequence: Synthetic oligonucleotide
aggtgtgtgtgtatgctgagggg

SEQ ID NO: 1735 - DNA, 23 bp, Artificial Sequence
  Description of Artificial Sequence: Synthetic oligonucleotide
taggtgtgtgtgtatgctgaggg

SEQ ID NO: 1736 - DNA, 23 bp, Artificial Sequence
  Description of Artificial Sequence: Synthetic oligonucleotide
ctaggtgtgtgtgtatgctgagg

SEQ ID NO: 1737 - DNA, 23 bp, Artificial Sequence
  Description of Artificial Sequence: Synthetic oligonucleotide
atacacacacacctagccacagg

SEQ ID NO: 1738 - DNA, 23 bp, Artificial Sequence
  Description of Artificial Sequence: Synthetic oligonucleotide
actcattggttcctgtggctagg

SEQ ID NO: 1739 - DNA, 23 bp, Artificial Sequence
  Description of Artificial Sequence: Synthetic oligonucleotide
tattaactcattggttcctgtgg

SEQ ID NO: 1740 - DNA, 23 bp, Artificial Sequence
  Description of Artificial Sequence: Synthetic oligonucleotide
ctcctcaaatattaactcattgg

SEQ ID NO: 1741 - DNA, 23 bp, Artificial Sequence
  Description of Artificial Sequence: Synthetic oligonucleotide
aaccaatgagttaatatttgagg

SEQ ID NO: 1742 - DNA, 23 bp, Artificial Sequence
  Description of Artificial Sequence: Synthetic oligonucleotide
tgagttaatatttgaggagttgg

SEQ ID NO: 1743 - DNA, 23 bp, Artificial Sequence
  Description of Artificial Sequence: Synthetic oligonucleotide
gcctcaccaggatctcattgagg

SEQ ID NO: 1744 - DNA, 23 bp, Artificial Sequence
  Description of Artificial Sequence: Synthetic oligonucleotide
ttttgtcctcaatgagatcctgg

SEQ ID NO: 1745 - DNA, 23 bp, Artificial Sequence
  Description of Artificial Sequence: Synthetic oligonucleotide
tcctcaatgagatcctggtgagg

SEQ ID NO: 1746 - DNA, 23 bp, Artificial Sequence
  Description of Artificial Sequence: Synthetic oligonucleotide
acagctcaagtggcctcaccagg

SEQ ID NO: 1747 - DNA, 23 bp, Artificial Sequence
  Description of Artificial Sequence: Synthetic oligonucleotide
agggagctgaacagctcaagtgg

SEQ ID NO: 1748 - DNA, 23 bp, Artificial Sequence
  Description of Artificial Sequence: Synthetic oligonucleotide
tgagctgttcagctcccttgcgg

SEQ ID NO: 1749 - DNA, 23 bp, Artificial Sequence
  Description of Artificial Sequence: Synthetic oligonucleotide
ccatccccaaaataccgcaaggg

SEQ ID NO: 1750 - DNA, 23 bp, Artificial Sequence
  Description of Artificial Sequence: Synthetic oligonucleotide
tccatccccaaaataccgcaagg

SEQ ID NO: 1751 - DNA, 23 bp, Artificial Sequence
  Description of Artificial Sequence: Synthetic oligonucleotide
tcagctcccttgcggtattttgg

SEQ ID NO: 1752 - DNA, 23 bp, Artificial Sequence
  Description of Artificial Sequence: Synthetic oligonucleotide
cagctcccttgcggtattttggg

SEQ ID NO: 1753 - DNA, 23 bp, Artificial Sequence
  Description of Artificial Sequence: Synthetic oligonucleotide
agctcccttgcggtattttgggg

SEQ ID NO: 1754 - DNA, 23 bp, Artificial Sequence
  Description of Artificial Sequence: Synthetic oligonucleotide
cccttgcggtattttggggatgg

SEQ ID NO: 1755 - DNA, 23 bp, Artificial Sequence
  Description of Artificial Sequence: Synthetic oligonucleotide
agactctttttctatattgttgg

SEQ ID NO: 1756 - DNA, 23 bp, Artificial Sequence
  Description of Artificial Sequence: Synthetic oligonucleotide
caatatagaaaaagagtctttgg

SEQ ID NO: 1757 - DNA, 23 bp, Artificial Sequence
  Description of Artificial Sequence: Synthetic oligonucleotide
catggagcccctgggaaagctgg

SEQ ID NO: 1758 - DNA, 23 bp, Artificial Sequence
  Description of Artificial Sequence: Synthetic oligonucleotide
agtctttggccagctttcccagg

SEQ ID NO: 1759 - DNA, 23 bp, Artificial Sequence
  Description of Artificial Sequence: Synthetic oligonucleotide
gtctttggccagctttcccaggg

SEQ ID NO: 1760 - DNA, 23 bp, Artificial Sequence
  Description of Artificial Sequence: Synthetic oligonucleotide
tctttggccagctttcccagggg

SEQ ID NO: 1761 - DNA, 23 bp, Artificial Sequence
  Description of Artificial Sequence: Synthetic oligonucleotide
ctctatggcatggagcccctggg

SEQ ID NO: 1762 - DNA, 23 bp, Artificial Sequence
  Description of Artificial Sequence: Synthetic oligonucleotide
tctctatggcatggagcccctgg

SEQ ID NO: 1763 - DNA, 23 bp, Artificial Sequence
  Description of Artificial Sequence: Synthetic oligonucleotide
gtgcagtactctctatggcatgg

SEQ ID NO: 1764 - DNA, 23 bp, Artificial Sequence
  Description of Artificial Sequence: Synthetic oligonucleotide
cacgggtgcagtactctctatgg

SEQ ID NO: 1765 - DNA, 23 bp, Artificial Sequence
  Description of Artificial Sequence: Synthetic oligonucleotide
tcagggccccctgtgcacacggg

SEQ ID NO: 1766 - DNA, 23 bp, Artificial Sequence
  Description of Artificial Sequence: Synthetic oligonucleotide
gtcagggccccctgtgcacacgg

SEQ ID NO: 1767 - DNA, 23 bp, Artificial Sequence
  Description of Artificial Sequence: Synthetic oligonucleotide
agtactgcacccgtgtgcacagg

SEQ ID NO: 1768 - DNA, 23 bp, Artificial Sequence
  Description of Artificial Sequence: Synthetic oligonucleotide
gtactgcacccgtgtgcacaggg

SEQ ID NO: 1769 - DNA, 23 bp, Artificial Sequence
  Description of Artificial Sequence: Synthetic oligonucleotide
tactgcacccgtgtgcacagggg

SEQ ID NO: 1770 - DNA, 23 bp, Artificial Sequence
  Description of Artificial Sequence: Synthetic oligonucleotide
actgcacccgtgtgcacaggggg

SEQ ID NO: 1771 - DNA, 23 bp, Artificial Sequence
  Description of Artificial Sequence: Synthetic oligonucleotide
tcctcaaagtcctcatgtcaggg

SEQ ID NO: 1772 - DNA, 23 bp, Artificial Sequence
  Description of Artificial Sequence: Synthetic oligonucleotide
gcacagggggccctgacatgagg

SEQ ID NO: 1773 - DNA, 23 bp, Artificial Sequence
  Description of Artificial Sequence: Synthetic oligonucleotide
atcctcaaagtcctcatgtcagg

SEQ ID NO: 1774 - DNA, 23 bp, Artificial Sequence
  Description of Artificial Sequence: Synthetic oligonucleotide
gccctgacatgaggactttgagg

SEQ ID NO: 1775 - DNA, 23 bp, Artificial Sequence
  Description of Artificial Sequence: Synthetic oligonucleotide
agatgctgaagcagagttggagg

SEQ ID NO: 1776 - DNA, 23 bp, Artificial Sequence
  Description of Artificial Sequence: Synthetic oligonucleotide
tggagatgctgaagcagagttgg

SEQ ID NO: 1777 - DNA, 23 bp, Artificial Sequence
  Description of Artificial Sequence: Synthetic oligonucleotide
actctgcttcagcatctccatgg

SEQ ID NO: 1778 - DNA, 23 bp, Artificial Sequence
  Description of Artificial Sequence: Synthetic oligonucleotide
agtgtctgtgtgaaaatccatgg

SEQ ID NO: 1779 - DNA, 23 bp, Artificial Sequence
  Description of Artificial Sequence: Synthetic oligonucleotide
gattttcacacagacactttagg

SEQ ID NO: 1780 - DNA, 23 bp, Artificial Sequence
  Description of Artificial Sequence: Synthetic oligonucleotide
tttaggaaagaaactaagtttgg

SEQ ID NO: 1781 - DNA, 23 bp, Artificial Sequence
  Description of Artificial Sequence: Synthetic oligonucleotide
ttaggaaagaaactaagtttggg

SEQ ID NO: 1782 - DNA, 23 bp, Artificial Sequence
  Description of Artificial Sequence: Synthetic oligonucleotide
taggaaagaaactaagtttgggg

SEQ ID NO: 1783 - DNA, 23 bp, Artificial Sequence
  Description of Artificial Sequence: Synthetic oligonucleotide
aggaaagaaactaagtttggggg

SEQ ID NO: 1784 - DNA, 23 bp, Artificial Sequence
  Description of Artificial Sequence: Synthetic oligonucleotide
ggaaagaaactaagtttgggggg

SEQ ID NO: 1785 - DNA, 23 bp, Artificial Sequence
  Description of Artificial Sequence: Synthetic oligonucleotide
tggggctgtgatgtgggattagg

SEQ ID NO: 1786 - DNA, 23 bp, Artificial Sequence
  Description of Artificial Sequence: Synthetic oligonucleotide
tattactggggctgtgatgtggg

SEQ ID NO: 1787 - DNA, 23 bp, Artificial Sequence
  Description of Artificial Sequence: Synthetic oligonucleotide
gtattactggggctgtgatgtgg

SEQ ID NO: 1788 - DNA, 23 bp, Artificial Sequence
  Description of Artificial Sequence: Synthetic oligonucleotide
attccagggctgtattactgggg

SEQ ID NO: 1789 - DNA, 23 bp, Artificial Sequence
  Description of Artificial Sequence: Synthetic oligonucleotide
aattccagggctgtattactggg

SEQ ID NO: 1790 - DNA, 23 bp, Artificial Sequence
  Description of Artificial Sequence: Synthetic oligonucleotide
aaattccagggctgtattactgg

SEQ ID NO: 1791 - DNA, 23 bp, Artificial Sequence
  Description of Artificial Sequence: Synthetic oligonucleotide
cagccccagtaatacagccctgg

SEQ ID NO: 1792 - DNA, 23 bp, Artificial Sequence
  Description of Artificial Sequence: Synthetic oligonucleotide
gctttctgtgataaattccaggg

SEQ ID NO: 1793 - DNA, 23 bp, Artificial Sequence
  Description of Artificial Sequence: Synthetic oligonucleotide
ggctttctgtgataaattccagg

SEQ ID NO: 1794 - DNA, 23 bp, Artificial Sequence
  Description of Artificial Sequence: Synthetic oligonucleotide
tgggatatgcatgggattctagg

SEQ ID NO: 1795 - DNA, 23 bp, Artificial Sequence
  Description of Artificial Sequence: Synthetic oligonucleotide
catatgcatgggatatgcatggg

SEQ ID NO: 1796 - DNA, 23 bp, Artificial Sequence
  Description of Artificial Sequence: Synthetic oligonucleotide
gcatatgcatgggatatgcatgg

SEQ ID NO: 1797 - DNA, 23 bp, Artificial Sequence
  Description of Artificial Sequence: Synthetic oligonucleotide
gactagggatgcatatgcatggg

SEQ ID NO: 1798 - DNA, 23 bp, Artificial Sequence
  Description of Artificial Sequence: Synthetic oligonucleotide
ggactagggatgcatatgcatgg

SEQ ID NO: 1799 - DNA, 23 bp, Artificial Sequence
  Description of Artificial Sequence: Synthetic oligonucleotide
gccttgaacccataggactaggg

SEQ ID NO: 1800 - DNA, 23 bp, Artificial Sequence
  Description of Artificial Sequence: Synthetic oligonucleotide
agccttgaacccataggactagg

SEQ ID NO: 1801 - DNA, 23 bp, Artificial Sequence
  Description of Artificial Sequence: Synthetic oligonucleotide
catatgcatccctagtcctatgg

SEQ ID NO: 1802 - DNA, 23 bp, Artificial Sequence
  Description of Artificial Sequence: Synthetic oligonucleotide
atatgcatccctagtcctatggg

SEQ ID NO: 1803 - DNA, 23 bp, Artificial Sequence
  Description of Artificial Sequence: Synthetic oligonucleotide
gctccaagccttgaacccatagg

SEQ ID NO: 1804 - DNA, 23 bp, Artificial Sequence
  Description of Artificial Sequence: Synthetic oligonucleotide
tccctagtcctatgggttcaagg

SEQ ID NO: 1805 - DNA, 23 bp, Artificial Sequence
  Description of Artificial Sequence: Synthetic oligonucleotide
agtcctatgggttcaaggcttgg

SEQ ID NO: 1806 - DNA, 23 bp, Artificial Sequence
  Description of Artificial Sequence: Synthetic oligonucleotide
tcaaggcttggagctctccctgg

SEQ ID NO: 1807 - DNA, 23 bp, Artificial Sequence
  Description of Artificial Sequence: Synthetic oligonucleotide
acttttcccagctaaatccaggg

SEQ ID NO: 1808 - DNA, 23 bp, Artificial Sequence
  Description of Artificial Sequence: Synthetic oligonucleotide
aacttttcccagctaaatccagg

SEQ ID NO: 1809 - DNA, 23 bp, Artificial Sequence
  Description of Artificial Sequence: Synthetic oligonucleotide
gagctctccctggatttagctgg

SEQ ID NO: 1810 - DNA, 23 bp, Artificial Sequence
  Description of Artificial Sequence: Synthetic oligonucleotide
agctctccctggatttagctggg

SEQ ID NO: 1811 - DNA, 23 bp, Artificial Sequence
  Description of Artificial Sequence: Synthetic oligonucleotide
tggatttagctgggaaaagttgg

SEQ ID NO: 1812 - DNA, 23 bp, Artificial Sequence
  Description of Artificial Sequence: Synthetic oligonucleotide
ttctctgtcttctagaaatatgg

SEQ ID NO: 1813 - DNA, 23 bp, Artificial Sequence
  Description of Artificial Sequence: Synthetic oligonucleotide
gtttcttggtctatgaaatgggg

SEQ ID NO: 1814 - DNA, 23 bp, Artificial Sequence
  Description of Artificial Sequence: Synthetic oligonucleotide
agtttcttggtctatgaaatggg

SEQ ID NO: 1815 - DNA, 23 bp, Artificial Sequence
  Description of Artificial Sequence: Synthetic oligonucleotide
cagtttcttggtctatgaaatgg

SEQ ID NO: 1816 - DNA, 23 bp, Artificial Sequence
  Description of Artificial Sequence: Synthetic oligonucleotide
tctctctggtctcagtttcttgg

SEQ ID NO: 1817 - DNA, 23 bp, Artificial Sequence
  Description of Artificial Sequence: Synthetic oligonucleotide
tgaaagtccatttctctctctgg

SEQ ID NO: 1818 - DNA, 23 bp, Artificial Sequence
  Description of Artificial Sequence: Synthetic oligonucleotide
actgagaccagagagagaaatgg

SEQ ID NO: 1819 - DNA, 23 bp, Artificial Sequence
  Description of Artificial Sequence: Synthetic oligonucleotide
tgatccatcagtaactagcaggg

SEQ ID NO: 1820 - DNA, 23 bp, Artificial Sequence
  Description of Artificial Sequence: Synthetic oligonucleotide
gtgatccatcagtaactagcagg

SEQ ID NO: 1821 - DNA, 23 bp, Artificial Sequence
  Description of Artificial Sequence: Synthetic oligonucleotide
ttcaccctgctagttactgatgg

SEQ ID NO: 1822 - DNA, 23 bp, Artificial Sequence
  Description of Artificial Sequence: Synthetic oligonucleotide
agagaaacagtgctagaatcagg

SEQ ID NO: 1823 - DNA, 23 bp, Artificial Sequence
  Description of Artificial Sequence: Synthetic oligonucleotide
acacactttcaaaggtggtgtgg

SEQ ID NO: 1824 - DNA, 23 bp, Artificial Sequence
  Description of Artificial Sequence: Synthetic oligonucleotide
gattgacacactttcaaaggtgg

SEQ ID NO: 1825 - DNA, 23 bp, Artificial Sequence
  Description of Artificial Sequence: Synthetic oligonucleotide
tttgattgacacactttcaaagg

SEQ ID NO: 1826 - DNA, 23 bp, Artificial Sequence
  Description of Artificial Sequence: Synthetic oligonucleotide
aaatcttactttagttgcagagg

SEQ ID NO: 1827 - DNA, 23 bp, Artificial Sequence
  Description of Artificial Sequence: Synthetic oligonucleotide
gctaaacaggctattgtcttggg

SEQ ID NO: 1828 - DNA, 23 bp, Artificial Sequence
  Description of Artificial Sequence: Synthetic oligonucleotide
ggctaaacaggctattgtcttgg

SEQ ID NO: 1829 - DNA, 23 bp, Artificial Sequence
  Description of Artificial Sequence: Synthetic oligonucleotide
tgaacttataagggctaaacagg

SEQ ID NO: 1830 - DNA, 23 bp, Artificial Sequence
  Description of Artificial Sequence: Synthetic oligonucleotide
tttcatccctgaacttataaggg

SEQ ID NO: 1831 - DNA, 23 bp, Artificial Sequence
  Description of Artificial Sequence: Synthetic oligonucleotide
ctttcatccctgaacttataagg

SEQ ID NO: 1832 - DNA, 23 bp, Artificial Sequence
  Description of Artificial Sequence: Synthetic oligonucleotide
tgtttagcccttataagttcagg

SEQ ID NO: 1833 - DNA, 23 bp, Artificial Sequence
  Description of Artificial Sequence: Synthetic oligonucleotide
gtttagcccttataagttcaggg

SEQ ID NO: 1834 - DNA, 23 bp, Artificial Sequence
  Description of Artificial Sequence: Synthetic oligonucleotide
cttataagttcagggatgaaagg

SEQ ID NO: 1835 - DNA, 23 bp, Artificial Sequence
  Description of Artificial Sequence: Synthetic oligonucleotide
atgaaaggttagaaagaaacagg

SEQ ID NO: 1836 - DNA, 23 bp, Artificial Sequence
  Description of Artificial Sequence: Synthetic oligonucleotide
aaggttagaaagaaacaggatgg

SEQ ID NO: 1837 - DNA, 23 bp, Artificial Sequence
  Description of Artificial Sequence: Synthetic oligonucleotide
ttagaaagaaacaggatggaagg

SEQ ID NO: 1838 - DNA, 23 bp, Artificial Sequence
  Description of Artificial Sequence: Synthetic oligonucleotide
gaaagaaacaggatggaaggagg

SEQ ID NO: 1839 - DNA, 23 bp, Artificial Sequence
  Description of Artificial Sequence: Synthetic oligonucleotide
aaacaggatggaaggaggactgg

SEQ ID NO: 1840 - DNA, 23 bp, Artificial Sequence
  Description of Artificial Sequence: Synthetic oligonucleotide
actggagaaaaaaacaaaagagg

SEQ ID NO: 1841 - DNA, 23 bp, Artificial Sequence
  Description of Artificial Sequence: Synthetic oligonucleotide
gagaaaaaaacaaaagaggaagg

SEQ ID NO: 1842 - DNA, 23 bp, Artificial Sequence
  Description of Artificial Sequence: Synthetic oligonucleotide
aaaaaacaaaagaggaaggaagg

SEQ ID NO: 1843 - DNA, 23 bp, Artificial Sequence
  Description of Artificial Sequence: Synthetic oligonucleotide
aaacaaaagaggaaggaaggagg

SEQ ID NO: 1844 - DNA, 23 bp, Artificial Sequence
  Description of Artificial Sequence: Synthetic oligonucleotide
caaaagaggaaggaaggaggagg

SEQ ID NO: 1845 - DNA, 23 bp, Artificial Sequence
  Description of Artificial Sequence: Synthetic oligonucleotide
ggaaggaggaggaagcaaacagg

SEQ ID NO: 1846 - DNA, 23 bp, Artificial Sequence
  Description of Artificial Sequence: Synthetic oligonucleotide
gggctcccaggaaatgactgagg

SEQ ID NO: 1847 - DNA, 23 bp, Artificial Sequence
  Description of Artificial Sequence: Synthetic oligonucleotide
gtcactcctcagtcatttcctgg

SEQ ID NO: 1848 - DNA, 23 bp, Artificial Sequence
  Description of Artificial Sequence: Synthetic oligonucleotide
tcactcctcagtcatttcctggg

SEQ ID NO: 1849 - DNA, 23 bp, Artificial Sequence
  Description of Artificial Sequence: Synthetic oligonucleotide
tttgctagaaatgggctcccagg

SEQ ID NO: 1850 - DNA, 23 bp, Artificial Sequence
  Description of Artificial Sequence: Synthetic oligonucleotide
gctgtcactttgctagaaatggg

SEQ ID NO: 1851 - DNA, 23 bp, Artificial Sequence
  Description of Artificial Sequence: Synthetic oligonucleotide
agctgtcactttgctagaaatgg

SEQ ID NO: 1852 - DNA, 23 bp, Artificial Sequence
  Description of Artificial Sequence: Synthetic oligonucleotide
aagtgacagctgcaactccctgg

SEQ ID NO: 1853 - DNA, 23 bp, Artificial Sequence
  Description of Artificial Sequence: Synthetic oligonucleotide
ctaagatgctcaggtggccaggg

SEQ ID NO: 1854 - DNA, 23 bp, Artificial Sequence
  Description of Artificial Sequence: Synthetic oligonucleotide
gctaagatgctcaggtggccagg

SEQ ID NO: 1855 - DNA, 23 bp, Artificial Sequence
  Description of Artificial Sequence: Synthetic oligonucleotide
gatcagctaagatgctcaggtgg

SEQ ID NO: 1856 - DNA, 23 bp, Artificial Sequence
  Description of Artificial Sequence: Synthetic oligonucleotide
acagatcagctaagatgctcagg

SEQ ID NO: 1857 - DNA, 23 bp, Artificial Sequence
  Description of Artificial Sequence: Synthetic oligonucleotide
tctgtctctgaaacaccccctgg

SEQ ID NO: 1858 - DNA, 23 bp, Artificial Sequence
  Description of Artificial Sequence: Synthetic oligonucleotide
tgattcatctgttctccaggggg

SEQ ID NO: 1859 - DNA, 23 bp, Artificial Sequence
  Description of Artificial Sequence: Synthetic oligonucleotide
ctgattcatctgttctccagggg

SEQ ID NO: 1860 - DNA, 23 bp, Artificial Sequence
  Description of Artificial Sequence: Synthetic oligonucleotide
cctgattcatctgttctccaggg

SEQ ID NO: 1861 - DNA, 23 bp, Artificial Sequence
  Description of Artificial Sequence: Synthetic oligonucleotide
gcctgattcatctgttctccagg

SEQ ID NO: 1862 - DNA, 23 bp, Artificial Sequence
  Description of Artificial Sequence: Synthetic oligonucleotide
ccctggagaacagatgaatcagg

SEQ ID NO: 1863 - DNA, 23 bp, Artificial Sequence
  Description of Artificial Sequence: Synthetic oligonucleotide
atttaaatggagtcgtctcaggg

SEQ ID NO: 1864 - DNA, 23 bp, Artificial Sequence
  Description of Artificial Sequence: Synthetic oligonucleotide
catttaaatggagtcgtctcagg

SEQ ID NO: 1865 - DNA, 23 bp, Artificial Sequence
  Description of Artificial Sequence: Synthetic oligonucleotide
cctgctcttgttcatttaaatgg

SEQ ID NO: 1866 - DNA, 23 bp, Artificial Sequence
  Description of Artificial Sequence: Synthetic oligonucleotide
ccatttaaatgaacaagagcagg

SEQ ID NO: 1867 - DNA, 23 bp, Artificial Sequence
  Description of Artificial Sequence: Synthetic oligonucleotide
tgaacaagagcaggatttcctgg

SEQ ID NO: 1868 - DNA, 23 bp, Artificial Sequence
  Description of Artificial Sequence: Synthetic oligonucleotide
gaacaagagcaggatttcctggg

SEQ ID NO: 1869 - DNA, 23 bp, Artificial Sequence
  Description of Artificial Sequence: Synthetic oligonucleotide
aaggtgctctcagtgtgcccagg

SEQ ID NO: 1870 - DNA, 23 bp, Artificial Sequence
  Description of Artificial Sequence: Synthetic oligonucleotide
acactgagagcaccttccagagg

SEQ ID NO: 1871 - DNA, 23 bp, Artificial Sequence
  Description of Artificial Sequence: Synthetic oligonucleotide
gctctggaggggcctctggaagg

SEQ ID NO: 1872 - DNA, 23 bp, Artificial Sequence
  Description of Artificial Sequence: Synthetic oligonucleotide
tagggctctggaggggcctctgg

SEQ ID NO: 1873 - DNA, 23 bp, Artificial Sequence
  Description of Artificial Sequence: Synthetic oligonucleotide
caggctttagggctctggagggg

SEQ ID NO: 1874 - DNA, 23 bp, Artificial Sequence
  Description of Artificial Sequence: Synthetic oligonucleotide
acaggctttagggctctggaggg

SEQ ID NO: 1875 - DNA, 23 bp, Artificial Sequence
  Description of Artificial Sequence: Synthetic oligonucleotide
tacaggctttagggctctggagg

SEQ ID NO: 1876 - DNA, 23 bp, Artificial Sequence
  Description of Artificial Sequence: Synthetic oligonucleotide
aaatacaggctttagggctctgg

SEQ ID NO: 1877 - DNA, 23 bp, Artificial Sequence
  Description of Artificial Sequence: Synthetic oligonucleotide
tggaagaaatacaggctttaggg

SEQ ID NO: 1878 - DNA, 23 bp, Artificial Sequence
  Description of Artificial Sequence: Synthetic oligonucleotide
ctggaagaaatacaggctttagg

SEQ ID NO: 1879 - DNA, 23 bp, Artificial Sequence
  Description of Artificial Sequence: Synthetic oligonucleotide
aggccgactggaagaaatacagg

SEQ ID NO: 1880 - DNA, 23 bp, Artificial Sequence
  Description of Artificial Sequence: Synthetic oligonucleotide
aagcctgtatttcttccagtcgg

SEQ ID NO: 1881 - DNA, 23 bp, Artificial Sequence
  Description of Artificial Sequence: Synthetic oligonucleotide
caggaaagaaacaggccgactgg

SEQ ID NO: 1882 - DNA, 23 bp, Artificial Sequence
  Description of Artificial Sequence: Synthetic oligonucleotide
gacatcaccaggaaagaaacagg

SEQ ID NO: 1883 - DNA, 23 bp, Artificial Sequence
  Description of Artificial Sequence: Synthetic oligonucleotide
cagtcggcctgtttctttcctgg

SEQ ID NO: 1884 - DNA, 23 bp, Artificial Sequence
  Description of Artificial Sequence: Synthetic oligonucleotide
gggcgtttaatgacatcaccagg

SEQ ID NO: 1885 - DNA, 23 bp, Artificial Sequence
  Description of Artificial Sequence: Synthetic oligonucleotide
ctcactgtgggactctcaaaggg

SEQ ID NO: 1886 - DNA, 23 bp, Artificial Sequence
  Description of Artificial Sequence: Synthetic oligonucleotide
gctcactgtgggactctcaaagg

SEQ ID NO: 1887 - DNA, 23 bp, Artificial Sequence
  Description of Artificial Sequence: Synthetic oligonucleotide
accgcagaactgctcactgtggg

SEQ ID NO: 1888 - DNA, 23 bp, Artificial Sequence
  Description of Artificial Sequence: Synthetic oligonucleotide
taccgcagaactgctcactgtgg

SEQ ID NO: 1889 - DNA, 23 bp, Artificial Sequence
  Description of Artificial Sequence: Synthetic oligonucleotide
tcccacagtgagcagttctgcgg

SEQ ID NO: 1890 - DNA, 23 bp, Artificial Sequence
  Description of Artificial Sequence: Synthetic oligonucleotide
actcagactttaattgcagcggg

SEQ ID NO: 1891 - DNA, 23 bp, Artificial Sequence
  Description of Artificial Sequence: Synthetic oligonucleotide
gactcagactttaattgcagcgg

SEQ ID NO: 1892 - DNA, 23 bp, Artificial Sequence
  Description of Artificial Sequence: Synthetic oligonucleotide
tatgccctttgagacaggaaagg

SEQ ID NO: 1893 - DNA, 23 bp, Artificial Sequence
  Description of Artificial Sequence: Synthetic oligonucleotide
atgaatatgccctttgagacagg

SEQ ID NO: 1894 - DNA, 23 bp, Artificial Sequence
  Description of Artificial Sequence: Synthetic oligonucleotide
tgagtcctttcctgtctcaaagg

SEQ ID NO: 1895 - DNA, 23 bp, Artificial Sequence
  Description of Artificial Sequence: Synthetic oligonucleotide
gagtcctttcctgtctcaaaggg

SEQ ID NO: 1896 - DNA, 23 bp, Artificial Sequence
  Description of Artificial Sequence: Synthetic oligonucleotide
ggcatattcatatagaagaaagg

SEQ ID NO: 1897 - DNA, 23 bp, Artificial Sequence
  Description of Artificial Sequence: Synthetic oligonucleotide
ttcatatagaagaaaggaaaagg

SEQ ID NO: 1898 - DNA, 23 bp, Artificial Sequence
  Description of Artificial Sequence: Synthetic oligonucleotide
tatagaagaaaggaaaaggaagg

SEQ ID NO: 1899 - DNA, 23 bp, Artificial Sequence
  Description of Artificial Sequence: Synthetic oligonucleotide
aagaaaggaaaaggaaggactgg

SEQ ID NO: 1900 - DNA, 23 bp, Artificial Sequence
  Description of Artificial Sequence: Synthetic oligonucleotide
aaggactggctgtttgcatttgg

SEQ ID NO: 1901 - DNA, 23 bp, Artificial Sequence
  Description of Artificial Sequence: Synthetic oligonucleotide
ggctgtttgcatttggttccagg

SEQ ID NO: 1902 - DNA, 23 bp, Artificial Sequence
  Description of Artificial Sequence: Synthetic oligonucleotide
cgacctctactcaacaggcctgg

SEQ ID NO: 1903 - DNA, 23 bp, Artificial Sequence
  Description of Artificial Sequence: Synthetic oligonucleotide
gagcacgacctctactcaacagg

SEQ ID NO: 1904 - DNA, 23 bp, Artificial Sequence
  Description of Artificial Sequence: Synthetic oligonucleotide
gttccaggcctgttgagtagagg

SEQ ID NO: 1905 - DNA, 23 bp, Artificial Sequence
  Description of Artificial Sequence: Synthetic oligonucleotide
ggtcgtgctcactccaccgaagg

SEQ ID NO: 1906 - DNA, 23 bp, Artificial Sequence
  Description of Artificial Sequence: Synthetic oligonucleotide
aggctaccctgtaccttcggtgg

SEQ ID NO: 1907 - DNA, 23 bp, Artificial Sequence
  Description of Artificial Sequence: Synthetic oligonucleotide
tgaaggctaccctgtaccttcgg

SEQ ID NO: 1908 - DNA, 23 bp, Artificial Sequence
  Description of Artificial Sequence: Synthetic oligonucleotide
gctcactccaccgaaggtacagg

SEQ ID NO: 1909 - DNA, 23 bp, Artificial Sequence
  Description of Artificial Sequence: Synthetic oligonucleotide
ctcactccaccgaaggtacaggg

SEQ ID NO: 1910 - DNA, 23 bp, Artificial Sequence
  Description of Artificial Sequence: Synthetic oligonucleotide
aaatccccaggttctgctgaagg

SEQ ID NO: 1911 - DNA, 23 bp, Artificial Sequence
  Description of Artificial Sequence: Synthetic oligonucleotide
gggtagccttcagcagaacctgg

SEQ ID NO: 1912 - DNA, 23 bp, Artificial Sequence
  Description of Artificial Sequence: Synthetic oligonucleotide
ggtagccttcagcagaacctggg

SEQ ID NO: 1913 - DNA, 23 bp, Artificial Sequence
  Description of Artificial Sequence: Synthetic oligonucleotide
gtagccttcagcagaacctgggg

SEQ ID NO: 1914 - DNA, 23 bp, Artificial Sequence
  Description of Artificial Sequence: Synthetic oligonucleotide
ttgcttaaaaccaaatccccagg

SEQ ID NO: 1915 - DNA, 23 bp, Artificial Sequence
  Description of Artificial Sequence: Synthetic oligonucleotide
ttcagcagaacctggggatttgg

SEQ ID NO: 1916 - DNA, 23 bp, Artificial Sequence
  Description of Artificial Sequence: Synthetic oligonucleotide
gttttaagcaagtctttcttagg

SEQ ID NO: 1917 - DNA, 23 bp, Artificial Sequence
  Description of Artificial Sequence: Synthetic oligonucleotide
aagcaagtctttcttaggtgtgg

SEQ ID NO: 1918 - DNA, 23 bp, Artificial Sequence
  Description of Artificial Sequence: Synthetic oligonucleotide
agcaagtctttcttaggtgtggg

SEQ ID NO: 1919 - DNA, 23 bp, Artificial Sequence
  Description of Artificial Sequence: Synthetic oligonucleotide
ttcaaataatattgcaaggaagg

SEQ ID NO: 1920 - DNA, 23 bp, Artificial Sequence
  Description of Artificial Sequence: Synthetic oligonucleotide
gaatttcaaataatattgcaagg

SEQ ID NO: 1921 - DNA, 23 bp, Artificial Sequence
  Description of Artificial Sequence: Synthetic oligonucleotide
acgaaccaatattctggggacgg

SEQ ID NO: 1922 - DNA, 23 bp, Artificial Sequence
  Description of Artificial Sequence: Synthetic oligonucleotide
tttaacgaaccaatattctgggg

SEQ ID NO: 1923 - DNA, 23 bp, Artificial Sequence
  Description of Artificial Sequence: Synthetic oligonucleotide
ctttaacgaaccaatattctggg

SEQ ID NO: 1924 - DNA, 23 bp, Artificial Sequence
  Description of Artificial Sequence: Synthetic oligonucleotide
tttagccgtccccagaatattgg

SEQ ID NO: 1925 - DNA, 23 bp, Artificial Sequence
  Description of Artificial Sequence: Synthetic oligonucleotide
gctttaacgaaccaatattctgg

SEQ ID NO: 1926 - DNA, 23 bp, Artificial Sequence
  Description of Artificial Sequence: Synthetic oligonucleotide
tatttcagatctccagacagtgg

SEQ ID NO: 1927 - DNA, 23 bp, Artificial Sequence
  Description of Artificial Sequence: Synthetic oligonucleotide
tacaaacagtgaccactgtctgg

SEQ ID NO: 1928 - DNA, 23 bp, Artificial Sequence
  Description of Artificial Sequence: Synthetic oligonucleotide
caataagaacttttgttttctgg

SEQ ID NO: 1929 - DNA, 23 bp, Artificial Sequence
  Description of Artificial Sequence: Synthetic oligonucleotide
aaagtaagtatcttcgtaagagg

SEQ ID NO: 1930 - DNA, 23 bp, Artificial Sequence
  Description of Artificial Sequence: Synthetic oligonucleotide
tgtagatatattcccctctttgg

SEQ ID NO: 1931 - DNA, 23 bp, Artificial Sequence
  Description of Artificial Sequence: Synthetic oligonucleotide
ctgattgaatagccaaagagggg

SEQ ID NO: 1932 - DNA, 23 bp, Artificial Sequence
  Description of Artificial Sequence: Synthetic oligonucleotide
tctgattgaatagccaaagaggg

SEQ ID NO: 1933 - DNA, 23 bp, Artificial Sequence
  Description of Artificial Sequence: Synthetic oligonucleotide
ctctgattgaatagccaaagagg

SEQ ID NO: 1934 - DNA, 23 bp, Artificial Sequence
  Description of Artificial Sequence: Synthetic oligonucleotide
cacatatgtgtatcaggcagtgg

SEQ ID NO: 1935 - DNA, 23 bp, Artificial Sequence
  Description of Artificial Sequence: Synthetic oligonucleotide
gtaaaacacatatgtgtatcagg

SEQ ID NO: 1936 - DNA, 23 bp, Artificial Sequence
  Description of Artificial Sequence: Synthetic oligonucleotide
acatatgtgttttacagatgagg

SEQ ID NO: 1937 - DNA, 23 bp, Artificial Sequence
  Description of Artificial Sequence: Synthetic oligonucleotide
gccaatttcatcatctctctggg

SEQ ID NO: 1938 - DNA, 23 bp, Artificial Sequence
  Description of Artificial Sequence: Synthetic oligonucleotide
agccaatttcatcatctctctgg

SEQ ID NO: 1939 - DNA, 23 bp, Artificial Sequence
  Description of Artificial Sequence: Synthetic oligonucleotide
acccagagagatgatgaaattgg

SEQ ID NO: 1940 - DNA, 23 bp, Artificial Sequence
  Description of Artificial Sequence: Synthetic oligonucleotide
agagatgatgaaattggctgagg

SEQ ID NO: 1941 - DNA, 23 bp, Artificial Sequence
  Description of Artificial Sequence: Synthetic oligonucleotide
atgatgaaattggctgaggatgg

SEQ ID NO: 1942 - DNA, 23 bp, Artificial Sequence
  Description of Artificial Sequence: Synthetic oligonucleotide
ttggctgaggatggcccagctgg

SEQ ID NO: 1943 - DNA, 23 bp, Artificial Sequence
  Description of Artificial Sequence: Synthetic oligonucleotide
gagtctttcactgaccagctggg

SEQ ID NO: 1944 - DNA, 23 bp, Artificial Sequence
  Description of Artificial Sequence: Synthetic oligonucleotide
tgagtctttcactgaccagctgg

SEQ ID NO: 1945 - DNA, 23 bp, Artificial Sequence
  Description of Artificial Sequence: Synthetic oligonucleotide
gaaagactcagagccagagctgg

SEQ ID NO: 1946 - DNA, 23 bp, Artificial Sequence
  Description of Artificial Sequence: Synthetic oligonucleotide
aaagagccctgcaccagctctgg

SEQ ID NO: 1947 - DNA, 23 bp, Artificial Sequence
  Description of Artificial Sequence: Synthetic oligonucleotide
ctcagagccagagctggtgcagg

SEQ ID NO: 1948 - DNA, 23 bp, Artificial Sequence
  Description of Artificial Sequence: Synthetic oligonucleotide
tcagagccagagctggtgcaggg

SEQ ID NO: 1949 - DNA, 23 bp, Artificial Sequence
  Description of Artificial Sequence: Synthetic oligonucleotide
gttcctgaaagggaacaggaagg

SEQ ID NO: 1950 - DNA, 23 bp, Artificial Sequence
  Description of Artificial Sequence: Synthetic oligonucleotide
gagtgttcctgaaagggaacagg

SEQ ID NO: 1951 - DNA, 23 bp, Artificial Sequence
  Description of Artificial Sequence: Synthetic oligonucleotide
attccttcctgttccctttcagg

SEQ ID NO: 1952 - DNA, 23 bp, Artificial Sequence
  Description of Artificial Sequence: Synthetic oligonucleotide
gatggtgagtgttcctgaaaggg

SEQ ID NO: 1953 - DNA, 23 bp, Artificial Sequence
  Description of Artificial Sequence: Synthetic oligonucleotide
cgatggtgagtgttcctgaaagg

SEQ ID NO: 1954 - DNA, 23 bp, Artificial Sequence
  Description of Artificial Sequence: Synthetic oligonucleotide
ctttcaggaacactcaccatcgg

SEQ ID NO: 1955 - DNA, 23 bp, Artificial Sequence
  Description of Artificial Sequence: Synthetic oligonucleotide
attattcacaggaaagccgatgg

SEQ ID NO: 1956 - DNA, 23 bp, Artificial Sequence
  Description of Artificial Sequence: Synthetic oligonucleotide
tttatctcaacattattcacagg

SEQ ID NO: 1957 - DNA, 23 bp, Artificial Sequence
  Description of Artificial Sequence: Synthetic oligonucleotide
taatgttgagataaaatccttgg

SEQ ID NO: 1958 - DNA, 23 bp, Artificial Sequence
  Description of Artificial Sequence: Synthetic oligonucleotide
ctagaaaacataatgcaccaagg

SEQ ID NO: 1959 - DNA, 23 bp, Artificial Sequence
  Description of Artificial Sequence: Synthetic oligonucleotide
ttctagtcacaacattgactagg

SEQ ID NO: 1960 - DNA, 23 bp, Artificial Sequence
  Description of Artificial Sequence: Synthetic oligonucleotide
actgggagaacagaggactctgg

SEQ ID NO: 1961 - DNA, 23 bp, Artificial Sequence
  Description of Artificial Sequence: Synthetic oligonucleotide
ccaaccaactgggagaacagagg

SEQ ID NO: 1962 - DNA, 23 bp, Artificial Sequence
  Description of Artificial Sequence: Synthetic oligonucleotide
gagtcctctgttctcccagttgg

SEQ ID NO: 1963 - DNA, 23 bp, Artificial Sequence
  Description of Artificial Sequence: Synthetic oligonucleotide
acacctacagccaaccaactggg

SEQ ID NO: 1964 - DNA, 23 bp, Artificial Sequence
  Description of Artificial Sequence: Synthetic oligonucleotide
cctctgttctcccagttggttgg

SEQ ID NO: 1965 - DNA, 23 bp, Artificial Sequence
  Description of Artificial Sequence: Synthetic oligonucleotide
aacacctacagccaaccaactgg

SEQ ID NO: 1966 - DNA, 23 bp, Artificial Sequence
  Description of Artificial Sequence: Synthetic oligonucleotide
tctcccagttggttggctgtagg

SEQ ID NO: 1967 - DNA, 23 bp, Artificial Sequence
  Description of Artificial Sequence: Synthetic oligonucleotide
agttggttggctgtaggtgttgg

SEQ ID NO: 1968 - DNA, 23 bp, Artificial Sequence
  Description of Artificial Sequence: Synthetic oligonucleotide
tgtaggtgttggcagccgccagg

SEQ ID NO: 1969 - DNA, 23 bp, Artificial Sequence
  Description of Artificial Sequence: Synthetic oligonucleotide
gttctgtagaatgctcctggcgg

SEQ ID NO: 1970 - DNA, 23 bp, Artificial Sequence
  Description of Artificial Sequence: Synthetic oligonucleotide
tctgttctgtagaatgctcctgg

SEQ ID NO: 1971 - DNA, 23 bp, Artificial Sequence
  Description of Artificial Sequence: Synthetic oligonucleotide
aggagcattctacagaacagagg

SEQ ID NO: 1972 - DNA, 23 bp, Artificial Sequence
  Description of Artificial Sequence: Synthetic oligonucleotide
agcattctacagaacagaggagg

SEQ ID NO: 1973 - DNA, 23 bp, Artificial Sequence
  Description of Artificial Sequence: Synthetic oligonucleotide
gagtgagactctccttgctcagg

SEQ ID NO: 1974 - DNA, 23 bp, Artificial Sequence
  Description of Artificial Sequence: Synthetic oligonucleotide
aggtctgcctttcctgagcaagg

SEQ ID NO: 1975 - DNA, 23 bp, Artificial Sequence
  Description of Artificial Sequence: Synthetic oligonucleotide
agactctccttgctcaggaaagg

SEQ ID NO: 1976 - DNA, 23 bp, Artificial Sequence
  Description of Artificial Sequence: Synthetic oligonucleotide
ggagttatttgctaagtcatagg

SEQ ID NO: 1977 - DNA, 23 bp, Artificial Sequence
  Description of Artificial Sequence: Synthetic oligonucleotide
cttagcaaataactcctaagagg

SEQ ID NO: 1978 - DNA, 23 bp, Artificial Sequence
  Description of Artificial Sequence: Synthetic oligonucleotide
gggtgaaacactctcctcttagg

SEQ ID NO: 1979 - DNA, 23 bp, Artificial Sequence
  Description of Artificial Sequence: Synthetic oligonucleotide
agccaaggaagaggaatggtggg

SEQ ID NO: 1980 - DNA, 23 bp, Artificial Sequence
  Description of Artificial Sequence: Synthetic oligonucleotide
cagccaaggaagaggaatggtgg

SEQ ID NO: 1981 - DNA, 23 bp, Artificial Sequence
  Description of Artificial Sequence: Synthetic oligonucleotide
ccacagccaaggaagaggaatgg

SEQ ID NO: 1982 - DNA, 23 bp, Artificial Sequence
  Description of Artificial Sequence: Synthetic oligonucleotide
cacccaccattcctcttccttgg

SEQ ID NO: 1983 - DNA, 23 bp, Artificial Sequence
  Description of Artificial Sequence: Synthetic oligonucleotide
tgcctccacagccaaggaagagg

SEQ ID NO: 1984 - DNA, 23 bp, Artificial Sequence
  Description of Artificial Sequence: Synthetic oligonucleotide
ccattcctcttccttggctgtgg

SEQ ID NO: 1985 - DNA, 23 bp, Artificial Sequence
  Description of Artificial Sequence: Synthetic oligonucleotide
ctaagttgcctccacagccaagg

SEQ ID NO: 1986 - DNA, 23 bp, Artificial Sequence
  Description of Artificial Sequence: Synthetic oligonucleotide
ttcctcttccttggctgtggagg

SEQ ID NO: 1987 - DNA, 23 bp, Artificial Sequence
  Description of Artificial Sequence: Synthetic oligonucleotide
tggctgtggaggcaacttagtgg

SEQ ID NO: 1988 - DNA, 23 bp, Artificial Sequence
  Description of Artificial Sequence: Synthetic oligonucleotide
gtggaggcaacttagtggagagg

SEQ ID NO: 1989 - DNA, 23 bp, Artificial Sequence
  Description of Artificial Sequence: Synthetic oligonucleotide
tggaggcaacttagtggagaggg

SEQ ID NO: 1990 - DNA, 23 bp, Artificial Sequence
  Description of Artificial Sequence: Synthetic oligonucleotide
ggaggcaacttagtggagagggg

SEQ ID NO: 1991 - DNA, 23 bp, Artificial Sequence
  Description of Artificial Sequence: Synthetic oligonucleotide
actgttcctcacaggtcatctgg

SEQ ID NO: 1992 - DNA, 23 bp, Artificial Sequence
  Description of Artificial Sequence: Synthetic oligonucleotide
gaggggccagatgacctgtgagg

SEQ ID NO: 1993 - DNA, 23 bp, Artificial Sequence
  Description of Artificial Sequence: Synthetic oligonucleotide
agggcttcactgttcctcacagg

SEQ ID NO: 1994 - DNA, 23 bp, Artificial Sequence
  Description of Artificial Sequence: Synthetic oligonucleotide
accatacattgtgttaggcaggg

SEQ ID NO: 1995 - DNA, 23 bp, Artificial Sequence
  Description of Artificial Sequence: Synthetic oligonucleotide
caccaacaggcaaggcccggagg

SEQ ID NO: 1996 - DNA, 23 bp, Artificial Sequence
  Description of Artificial Sequence: Synthetic oligonucleotide
ccacaccaacaggcaaggcccgg

SEQ ID NO: 1997 - DNA, 23 bp, Artificial Sequence
  Description of Artificial Sequence: Synthetic oligonucleotide
tccacccacaccaacaggcaagg

SEQ ID NO: 1998 - DNA, 23 bp, Artificial Sequence
  Description of Artificial Sequence: Synthetic oligonucleotide
atcctccgggccttgcctgttgg

SEQ ID NO: 1999 - DNA, 23 bp, Artificial Sequence
  Description of Artificial Sequence: Synthetic oligonucleotide
tcccttccacccacaccaacagg

SEQ ID NO: 2000 - DNA, 23 bp, Artificial Sequence
  Description of Artificial Sequence: Synthetic oligonucleotide
ccgggccttgcctgttggtgtgg

SEQ ID NO: 2001 - DNA, 23 bp, Artificial Sequence
  Description of Artificial Sequence: Synthetic oligonucleotide
cgggccttgcctgttggtgtggg

SEQ ID NO: 2002 - DNA, 23 bp, Artificial Sequence
  Description of Artificial Sequence: Synthetic oligonucleotide
gccttgcctgttggtgtgggtgg

SEQ ID NO: 2003 - DNA, 23 bp, Artificial Sequence
  Description of Artificial Sequence: Synthetic oligonucleotide
tgcctgttggtgtgggtggaagg

SEQ ID NO: 2004 - DNA, 23 bp, Artificial Sequence
  Description of Artificial Sequence: Synthetic oligonucleotide
gcctgttggtgtgggtggaaggg

SEQ ID NO: 2005 - DNA, 23 bp, Artificial Sequence
  Description of Artificial Sequence: Synthetic oligonucleotide
ttggtgtgggtggaagggaatgg

SEQ ID NO: 2006 - DNA, 23 bp, Artificial Sequence
  Description of Artificial Sequence: Synthetic oligonucleotide
gtgtgggtggaagggaatggtgg

SEQ ID NO: 2007 - DNA, 23 bp, Artificial Sequence
  Description of Artificial Sequence: Synthetic oligonucleotide
tgtgggtggaagggaatggtggg

SEQ ID NO: 2008 - DNA, 23 bp, Artificial Sequence
  Description of Artificial Sequence: Synthetic oligonucleotide
ggaagggaatggtgggagagagg

SEQ ID NO: 2009 - DNA, 23 bp, Artificial Sequence
  Description of Artificial Sequence: Synthetic oligonucleotide
cactctgctgccttttatgtggg

SEQ ID NO: 2010 - DNA, 23 bp, Artificial Sequence
  Description of Artificial Sequence: Synthetic oligonucleotide
gagaggagtacccacataaaagg

SEQ ID NO: 2011 - DNA, 23 bp, Artificial Sequence
  Description of Artificial Sequence: Synthetic oligonucleotide
acactctgctgccttttatgtgg

SEQ ID NO: 2012 - DNA, 23 bp, Artificial Sequence
  Description of Artificial Sequence: Synthetic oligonucleotide
aaaaggcagcagagtgtgaatgg

SEQ ID NO: 2013 - DNA, 23 bp, Artificial Sequence
  Description of Artificial Sequence: Synthetic oligonucleotide
aaaggcagcagagtgtgaatggg

SEQ ID NO: 2014 - DNA, 23 bp, Artificial Sequence
  Description of Artificial Sequence: Synthetic oligonucleotide
aaggcagcagagtgtgaatgggg

SEQ ID NO: 2015 - DNA, 23 bp, Artificial Sequence
  Description of Artificial Sequence: Synthetic oligonucleotide
aggcagcagagtgtgaatggggg

SEQ ID NO: 2016 - DNA, 23 bp, Artificial Sequence
  Description of Artificial Sequence: Synthetic oligonucleotide
cagagtgtgaatgggggcagtgg

SEQ ID NO: 2017 - DNA, 23 bp, Artificial Sequence
  Description of Artificial Sequence: Synthetic oligonucleotide
tgaatgggggcagtggcacaagg

SEQ ID NO: 2018 - DNA, 23 bp, Artificial Sequence
  Description of Artificial Sequence: Synthetic oligonucleotide
ggggcagtggcacaaggacatgg

SEQ ID NO: 2019 - DNA, 23 bp, Artificial Sequence
  Description of Artificial Sequence: Synthetic oligonucleotide
ctggggccagtgggcacgtgggg

SEQ ID NO: 2020 - DNA, 23 bp, Artificial Sequence
  Description of Artificial Sequence: Synthetic oligonucleotide
cctggggccagtgggcacgtggg

SEQ ID NO: 2021 - DNA, 23 bp, Artificial Sequence
  Description of Artificial Sequence: Synthetic oligonucleotide
gcctggggccagtgggcacgtgg

SEQ ID NO: 2022 - DNA, 23 bp, Artificial Sequence
  Description of Artificial Sequence: Synthetic oligonucleotide
cattctccccacgtgcccactgg

SEQ ID NO: 2023 - DNA, 23 bp, Artificial Sequence
  Description of Artificial Sequence: Synthetic oligonucleotide
gcatagagcctggggccagtggg

SEQ ID NO: 2024 - DNA, 23 bp, Artificial Sequence
  Description of Artificial Sequence: Synthetic oligonucleotide
cgcatagagcctggggccagtgg

SEQ ID NO: 2025 - DNA, 23 bp, Artificial Sequence
  Description of Artificial Sequence: Synthetic oligonucleotide
cccacgtgcccactggccccagg

SEQ ID NO: 2026 - DNA, 23 bp, Artificial Sequence
  Description of Artificial Sequence: Synthetic oligonucleotide
agcccctcgcatagagcctgggg

SEQ ID NO: 2027 - DNA, 23 bp, Artificial Sequence
  Description of Artificial Sequence: Synthetic oligonucleotide
cagcccctcgcatagagcctggg

SEQ ID NO: 2028 - DNA, 23 bp, Artificial Sequence
  Description of Artificial Sequence: Synthetic oligonucleotide
tcagcccctcgcatagagcctgg

SEQ ID NO: 2029 - DNA, 23 bp, Artificial Sequence
  Description of Artificial Sequence: Synthetic oligonucleotide
ctggccccaggctctatgcgagg

SEQ ID NO: 2030 - DNA, 23 bp, Artificial Sequence
  Description of Artificial Sequence: Synthetic oligonucleotide
tggccccaggctctatgcgaggg

SEQ ID NO: 2031 - DNA, 23 bp, Artificial Sequence
  Description of Artificial Sequence: Synthetic oligonucleotide
ggccccaggctctatgcgagggg

SEQ ID NO: 2032 - DNA, 23 bp, Artificial Sequence
  Description of Artificial Sequence: Synthetic oligonucleotide
aggctctatgcgaggggctgagg

SEQ ID NO: 2033 - DNA, 23 bp, Artificial Sequence
  Description of Artificial Sequence: Synthetic oligonucleotide
ctatgcgaggggctgaggaatgg

SEQ ID NO: 2034 - DNA, 23 bp, Artificial Sequence
  Description of Artificial Sequence: Synthetic oligonucleotide
aggggctgaggaatggaagctgg

SEQ ID NO: 2035 - DNA, 23 bp, Artificial Sequence
  Description of Artificial Sequence: Synthetic oligonucleotide
gaggccaggaggagcagctcagg

SEQ ID NO: 2036 - DNA, 23 bp, Artificial Sequence
  Description of Artificial Sequence: Synthetic oligonucleotide
atttcctgagctgctcctcctgg

SEQ ID NO: 2037 - DNA, 23 bp, Artificial Sequence
  Description of Artificial Sequence: Synthetic oligonucleotide
agtgtggtaaggaggccaggagg

SEQ ID NO: 2038 - DNA, 23 bp, Artificial Sequence
  Description of Artificial Sequence: Synthetic oligonucleotide
accagtgtggtaaggaggccagg

SEQ ID NO: 2039 - DNA, 23 bp, Artificial Sequence
  Description of Artificial Sequence: Synthetic oligonucleotide
actccaccagtgtggtaaggagg

SEQ ID NO: 2040 - DNA, 23 bp, Artificial Sequence
  Description of Artificial Sequence: Synthetic oligonucleotide
tctactccaccagtgtggtaagg

SEQ ID NO: 2041 - DNA, 23 bp, Artificial Sequence
  Description of Artificial Sequence: Synthetic oligonucleotide
tcctggcctccttaccacactgg

SEQ ID NO: 2042 - DNA, 23 bp, Artificial Sequence
  Description of Artificial Sequence: Synthetic oligonucleotide
tggcctccttaccacactggtgg

SEQ ID NO: 2043 - DNA, 23 bp, Artificial Sequence
  Description of Artificial Sequence: Synthetic oligonucleotide
tggagtctactccaccagtgtgg

SEQ ID NO: 2044 - DNA, 23 bp, Artificial Sequence
  Description of Artificial Sequence: Synthetic oligonucleotide
ggtggagtagactccaactgtgg

SEQ ID NO: 2045 - DNA, 23 bp, Artificial Sequence
  Description of Artificial Sequence: Synthetic oligonucleotide
gggcatggacaggccacagttgg

SEQ ID NO: 2046 - DNA, 23 bp, Artificial Sequence
  Description of Artificial Sequence: Synthetic oligonucleotide
ctgctgggaagggcatggacagg

SEQ ID NO: 2047 - DNA, 23 bp, Artificial Sequence
  Description of Artificial Sequence: Synthetic oligonucleotide
tgtgcctgctgggaagggcatgg

SEQ ID NO: 2048 - DNA, 23 bp, Artificial Sequence
  Description of Artificial Sequence: Synthetic oligonucleotide
gagcctgtgcctgctgggaaggg

SEQ ID NO: 2049 - DNA, 23 bp, Artificial Sequence
  Description of Artificial Sequence: Synthetic oligonucleotide
tgagcctgtgcctgctgggaagg

SEQ ID NO: 2050 - DNA, 23 bp, Artificial Sequence
  Description of Artificial Sequence: Synthetic oligonucleotide
ctgtccatgcccttcccagcagg

SEQ ID NO: 2051 - DNA, 23 bp, Artificial Sequence
  Description of Artificial Sequence: Synthetic oligonucleotide
agcctgagcctgtgcctgctggg

SEQ ID NO: 2052 - DNA, 23 bp, Artificial Sequence
  Description of Artificial Sequence: Synthetic oligonucleotide
gagcctgagcctgtgcctgctgg

SEQ ID NO: 2053 - DNA, 23 bp, Artificial Sequence
  Description of Artificial Sequence: Synthetic oligonucleotide
atgcccttcccagcaggcacagg

SEQ ID NO: 2054 - DNA, 23 bp, Artificial Sequence
  Description of Artificial Sequence: Synthetic oligonucleotide
ttcccagcaggcacaggctcagg

SEQ ID NO: 2055 - DNA, 23 bp, Artificial Sequence
  Description of Artificial Sequence: Synthetic oligonucleotide
gcaggcacaggctcaggctcagg

SEQ ID NO: 2056 - DNA, 23 bp, Artificial Sequence
  Description of Artificial Sequence: Synthetic oligonucleotide
caggctcaggctcaggctcttgg

SEQ ID NO: 2057 - DNA, 23 bp, Artificial Sequence
  Description of Artificial Sequence: Synthetic oligonucleotide
tcactcccagccagaggcagagg

SEQ ID NO: 2058 - DNA, 23 bp, Artificial Sequence
  Description of Artificial Sequence: Synthetic oligonucleotide
aggctcttggcctctgcctctgg

SEQ ID NO: 2059 - DNA, 23 bp, Artificial Sequence
  Description of Artificial Sequence: Synthetic oligonucleotide
tcttggcctctgcctctggctgg

SEQ ID NO: 2060 - DNA, 23 bp, Artificial Sequence
  Description of Artificial Sequence: Synthetic oligonucleotide
cttggcctctgcctctggctggg

SEQ ID NO: 2061 - DNA, 23 bp, Artificial Sequence
  Description of Artificial Sequence: Synthetic oligonucleotide
ttagaatcactcccagccagagg

SEQ ID NO: 2062 - DNA, 23 bp, Artificial Sequence
  Description of Artificial Sequence: Synthetic oligonucleotide
tgattctaaacacatccagcagg

SEQ ID NO: 2063 - DNA, 23 bp, Artificial Sequence
  Description of Artificial Sequence: Synthetic oligonucleotide
gattctaaacacatccagcaggg

SEQ ID NO: 2064 - DNA, 23 bp, Artificial Sequence
  Description of Artificial Sequence: Synthetic oligonucleotide
ggctatcaggctgaccctgctgg

SEQ ID NO: 2065 - DNA, 23 bp, Artificial Sequence
  Description of Artificial Sequence: Synthetic oligonucleotide
tcggaaactgatgggctatcagg

SEQ ID NO: 2066 - DNA, 23 bp, Artificial Sequence
  Description of Artificial Sequence: Synthetic oligonucleotide
agagctgatcggaaactgatggg

SEQ ID NO: 2067 - DNA, 23 bp, Artificial Sequence
  Description of Artificial Sequence: Synthetic oligonucleotide
cagagctgatcggaaactgatgg

SEQ ID NO: 2068 - DNA, 23 bp, Artificial Sequence
  Description of Artificial Sequence: Synthetic oligonucleotide
ggctctctagcagagctgatcgg

SEQ ID NO: 2069 - DNA, 23 bp, Artificial Sequence
  Description of Artificial Sequence: Synthetic oligonucleotide
cagctctgctagagagccgatgg

SEQ ID NO: 2070 - DNA, 23 bp, Artificial Sequence
  Description of Artificial Sequence: Synthetic oligonucleotide
agctctgctagagagccgatggg

SEQ ID NO: 2071 - DNA, 23 bp, Artificial Sequence
  Description of Artificial Sequence: Synthetic oligonucleotide
cccctcctcccacatcccatcgg

SEQ ID NO: 2072 - DNA, 23 bp, Artificial Sequence
  Description of Artificial Sequence: Synthetic oligonucleotide
gctagagagccgatgggatgtgg

SEQ ID NO: 2073 - DNA, 23 bp, Artificial Sequence
  Description of Artificial Sequence: Synthetic oligonucleotide
ctagagagccgatgggatgtggg

SEQ ID NO: 2074 - DNA, 23 bp, Artificial Sequence
  Description of Artificial Sequence: Synthetic oligonucleotide
gagagccgatgggatgtgggagg

SEQ ID NO: 2075 - DNA, 23 bp, Artificial Sequence
  Description of Artificial Sequence: Synthetic oligonucleotide
agccgatgggatgtgggaggagg

SEQ ID NO: 2076 - DNA, 23 bp, Artificial Sequence
  Description of Artificial Sequence: Synthetic oligonucleotide
gccgatgggatgtgggaggaggg

SEQ ID NO: 2077 - DNA, 23 bp, Artificial Sequence
  Description of Artificial Sequence: Synthetic oligonucleotide
ccgatgggatgtgggaggagggg

SEQ ID NO: 2078 - DNA, 23 bp, Artificial Sequence
  Description of Artificial Sequence: Synthetic oligonucleotide
cgatgggatgtgggaggaggggg

SEQ ID NO: 2079 - DNA, 23 bp, Artificial Sequence
  Description of Artificial Sequence: Synthetic oligonucleotide
atgtgggaggagggggtcactgg

SEQ ID NO: 2080 - DNA, 23 bp, Artificial Sequence
  Description of Artificial Sequence: Synthetic oligonucleotide
tgggaggagggggtcactggtgg

SEQ ID NO: 2081 - DNA, 23 bp, Artificial Sequence
  Description of Artificial Sequence: Synthetic oligonucleotide
gggaggagggggtcactggtggg

SEQ ID NO: 2082 - DNA, 23 bp, Artificial Sequence
  Description of Artificial Sequence: Synthetic oligonucleotide
ggagggggtcactggtgggctgg

SEQ ID NO: 2083 - DNA, 23 bp, Artificial Sequence
  Description of Artificial Sequence: Synthetic oligonucleotide
agggagatggggatggcttgggg

SEQ ID NO: 2084 - DNA, 23 bp, Artificial Sequence
  Description of Artificial Sequence: Synthetic oligonucleotide
gagggagatggggatggcttggg

SEQ ID NO: 2085 - DNA, 23 bp, Artificial Sequence
  Description of Artificial Sequence: Synthetic oligonucleotide
agagggagatggggatggcttgg

SEQ ID NO: 2086 - DNA, 23 bp, Artificial Sequence
  Description of Artificial Sequence: Synthetic oligonucleotide
gacacagagggagatggggatgg

SEQ ID NO: 2087 - DNA, 23 bp, Artificial Sequence
  Description of Artificial Sequence: Synthetic oligonucleotide
tttagacacagagggagatgggg

SEQ ID NO: 2088 - DNA, 23 bp, Artificial Sequence
  Description of Artificial Sequence: Synthetic oligonucleotide
gtttagacacagagggagatggg

SEQ ID NO: 2089 - DNA, 23 bp, Artificial Sequence
  Description of Artificial Sequence: Synthetic oligonucleotide
agtttagacacagagggagatgg

SEQ ID NO: 2090 - DNA, 23 bp, Artificial Sequence
  Description of Artificial Sequence: Synthetic oligonucleotide
gggccaagtttagacacagaggg

SEQ ID NO: 2091 - DNA, 23 bp, Artificial Sequence
  Description of Artificial Sequence: Synthetic oligonucleotide
agggccaagtttagacacagagg

SEQ ID NO: 2092 - DNA, 23 bp, Artificial Sequence
  Description of Artificial Sequence: Synthetic oligonucleotide
tctccctctgtgtctaaacttgg

SEQ ID NO: 2093 - DNA, 23 bp, Artificial Sequence
  Description of Artificial Sequence: Synthetic oligonucleotide
tgtgtctaaacttggccctttgg

SEQ ID NO: 2094 - DNA, 23 bp, Artificial Sequence
  Description of Artificial Sequence: Synthetic oligonucleotide
tctccctaccgaactccaaaggg

SEQ ID NO: 2095 - DNA, 23 bp, Artificial Sequence
  Description of Artificial Sequence: Synthetic oligonucleotide
ttctccctaccgaactccaaagg

SEQ ID NO: 2096 - DNA, 23 bp, Artificial Sequence
  Description of Artificial Sequence: Synthetic oligonucleotide
aaacttggccctttggagttcgg

SEQ ID NO: 2097 - DNA, 23 bp, Artificial Sequence
  Description of Artificial Sequence: Synthetic oligonucleotide
ttggccctttggagttcggtagg

SEQ ID NO: 2098 - DNA, 23 bp, Artificial Sequence
  Description of Artificial Sequence: Synthetic oligonucleotide
tggccctttggagttcggtaggg

SEQ ID NO: 2099 - DNA, 23 bp, Artificial Sequence
  Description of Artificial Sequence: Synthetic oligonucleotide
tcggtagggagaagagccatagg

SEQ ID NO: 2100 - DNA, 23 bp, Artificial Sequence
  Description of Artificial Sequence: Synthetic oligonucleotide
agggagaagagccataggccagg

SEQ ID NO: 2101 - DNA, 23 bp, Artificial Sequence
  Description of Artificial Sequence: Synthetic oligonucleotide
gggtgagcccacctggcctatgg

SEQ ID NO: 2102 - DNA, 23 bp, Artificial Sequence
  Description of Artificial Sequence: Synthetic oligonucleotide
gagaagagccataggccaggtgg

SEQ ID NO: 2103 - DNA, 23 bp, Artificial Sequence
  Description of Artificial Sequence: Synthetic oligonucleotide
agaagagccataggccaggtggg

SEQ ID NO: 2104 - DNA, 23 bp, Artificial Sequence
  Description of Artificial Sequence: Synthetic oligonucleotide
tgactctgggtgagcccacctgg

SEQ ID NO: 2105 - DNA, 23 bp, Artificial Sequence
  Description of Artificial Sequence: Synthetic oligonucleotide
tgggactctctgctgactctggg

SEQ ID NO: 2106 - DNA, 23 bp, Artificial Sequence
  Description of Artificial Sequence: Synthetic oligonucleotide
gtgggactctctgctgactctgg

SEQ ID NO: 2107 - DNA, 23 bp, Artificial Sequence
  Description of Artificial Sequence: Synthetic oligonucleotide
tcagcagagagtcccacaaatgg

SEQ ID NO: 2108 - DNA, 23 bp, Artificial Sequence
  Description of Artificial Sequence: Synthetic oligonucleotide
cgcccagtgcaaccatttgtggg

SEQ ID NO: 2109 - DNA, 23 bp, Artificial Sequence
  Description of Artificial Sequence: Synthetic oligonucleotide
tcgcccagtgcaaccatttgtgg

SEQ ID NO: 2110 - DNA, 23 bp, Artificial Sequence
  Description of Artificial Sequence: Synthetic oligonucleotide
agtcccacaaatggttgcactgg

SEQ ID NO: 2111 - DNA, 23 bp, Artificial Sequence
  Description of Artificial Sequence: Synthetic oligonucleotide
gtcccacaaatggttgcactggg

SEQ ID NO: 2112 - DNA, 23 bp, Artificial Sequence
  Description of Artificial Sequence: Synthetic oligonucleotide
gcactgggcgaaagacagcatgg

SEQ ID NO: 2113 - DNA, 23 bp, Artificial Sequence
  Description of Artificial Sequence: Synthetic oligonucleotide
aaagctctaataaaattcacagg

SEQ ID NO: 2114 - DNA, 23 bp, Artificial Sequence
  Description of Artificial Sequence: Synthetic oligonucleotide
ctacacacaagtgactgtacagg

SEQ ID NO: 2115 - DNA, 23 bp, Artificial Sequence
  Description of Artificial Sequence: Synthetic oligonucleotide
tacacacaagtgactgtacaggg

SEQ ID NO: 2116 - DNA, 23 bp, Artificial Sequence
  Description of Artificial Sequence: Synthetic oligonucleotide
acacacaagtgactgtacagggg

SEQ ID NO: 2117 - DNA, 23 bp, Artificial Sequence
  Description of Artificial Sequence: Synthetic oligonucleotide
tttgaaatagagtcatcttttgg

SEQ ID NO: 2118 - DNA, 23 bp, Artificial Sequence
  Description of Artificial Sequence: Synthetic oligonucleotide
gagtcatcttttggtatctgcgg

SEQ ID NO: 2119 - DNA, 23 bp, Artificial Sequence
  Description of Artificial Sequence: Synthetic oligonucleotide
agtcatcttttggtatctgcggg

SEQ ID NO: 2120 - DNA, 23 bp, Artificial Sequence
  Description of Artificial Sequence: Synthetic oligonucleotide
gtcatcttttggtatctgcgggg

SEQ ID NO: 2121 - DNA, 23 bp, Artificial Sequence
  Description of Artificial Sequence: Synthetic oligonucleotide
tcatcttttggtatctgcggggg

SEQ ID NO: 2122 - DNA, 23 bp, Artificial Sequence
  Description of Artificial Sequence: Synthetic oligonucleotide
atctgcgggggattgattctagg

SEQ ID NO: 2123 - DNA, 23 bp, Artificial Sequence
  Description of Artificial Sequence: Synthetic oligonucleotide
ttgattctaggacccattctagg

SEQ ID NO: 2124 - DNA, 23 bp, Artificial Sequence
  Description of Artificial Sequence: Synthetic oligonucleotide
aggatatggcatcctagaatggg

SEQ ID NO: 2125 - DNA, 23 bp, Artificial Sequence
  Description of Artificial Sequence: Synthetic oligonucleotide
gaggatatggcatcctagaatgg

SEQ ID NO: 2126 - DNA, 23 bp, Artificial Sequence
  Description of Artificial Sequence: Synthetic oligonucleotide
gacttgaacatctgaggatatgg

SEQ ID NO: 2127 - DNA, 23 bp, Artificial Sequence
  Description of Artificial Sequence: Synthetic oligonucleotide
atcagggacttgaacatctgagg

SEQ ID NO: 2128 - DNA, 23 bp, Artificial Sequence
  Description of Artificial Sequence: Synthetic oligonucleotide
tactataccactttatatcaggg

SEQ ID NO: 2129 - DNA, 23 bp, Artificial Sequence
  Description of Artificial Sequence: Synthetic oligonucleotide
atactataccactttatatcagg

SEQ ID NO: 2130 - DNA, 23 bp, Artificial Sequence
  Description of Artificial Sequence: Synthetic oligonucleotide
ttcaagtccctgatataaagtgg

SEQ ID NO: 2131 - DNA, 23 bp, Artificial Sequence
  Description of Artificial Sequence: Synthetic oligonucleotide
ttgagatgatttaaagtacatgg

SEQ ID NO: 2132 - DNA, 23 bp, Artificial Sequence
  Description of Artificial Sequence: Synthetic oligonucleotide
cataggatttacattatatttgg

SEQ ID NO: 2133 - DNA, 23 bp, Artificial Sequence
  Description of Artificial Sequence: Synthetic oligonucleotide
ggtataacaactacttacatagg

SEQ ID NO: 2134 - DNA, 23 bp, Artificial Sequence
  Description of Artificial Sequence: Synthetic oligonucleotide
taatacaaaaatttaaaagaggg

SEQ ID NO: 2135 - DNA, 23 bp, Artificial Sequence
  Description of Artificial Sequence: Synthetic oligonucleotide
ataatacaaaaatttaaaagagg

SEQ ID NO: 2136 - DNA, 23 bp, Artificial Sequence
  Description of Artificial Sequence: Synthetic oligonucleotide
tgtatttcaaaaaatatttttgg

SEQ ID NO: 2137 - DNA, 23 bp, Artificial Sequence
  Description of Artificial Sequence: Synthetic oligonucleotide
cccacagattcaactaaacatgg

SEQ ID NO: 2138 - DNA, 23 bp, Artificial Sequence
  Description of Artificial Sequence: Synthetic oligonucleotide
tccatgtttagttgaatctgtgg

SEQ ID NO: 2139 - DNA, 23 bp, Artificial Sequence
  Description of Artificial Sequence: Synthetic oligonucleotide
ccatgtttagttgaatctgtggg

SEQ ID NO: 2140 - DNA, 23 bp, Artificial Sequence
  Description of Artificial Sequence: Synthetic oligonucleotide
agttggcccttcgtatctgtggg

SEQ ID NO: 2141 - DNA, 23 bp, Artificial Sequence
  Description of Artificial Sequence: Synthetic oligonucleotide
cagttggcccttcgtatctgtgg

SEQ ID NO: 2142 - DNA, 23 bp, Artificial Sequence
  Description of Artificial Sequence: Synthetic oligonucleotide
tgaagaacccacagatacgaagg

SEQ ID NO: 2143 - DNA, 23 bp, Artificial Sequence
  Description of Artificial Sequence: Synthetic oligonucleotide
gaagaacccacagatacgaaggg

SEQ ID NO: 2144 - DNA, 23 bp, Artificial Sequence
  Description of Artificial Sequence: Synthetic oligonucleotide
aaaaaaatagccaatacagttgg

SEQ ID NO: 2145 - DNA, 23 bp, Artificial Sequence
  Description of Artificial Sequence: Synthetic oligonucleotide
atacgaagggccaactgtattgg

SEQ ID NO: 2146 - DNA, 23 bp, Artificial Sequence
  Description of Artificial Sequence: Synthetic oligonucleotide
tagttaagaatgtgagactgagg

SEQ ID NO: 2147 - DNA, 23 bp, Artificial Sequence
  Description of Artificial Sequence: Synthetic oligonucleotide
aagaatgtgagactgaggccagg

SEQ ID NO: 2148 - DNA, 23 bp, Artificial Sequence
  Description of Artificial Sequence: Synthetic oligonucleotide
aaggcatgagccactgcgcctgg

SEQ ID NO: 2149 - DNA, 23 bp, Artificial Sequence
  Description of Artificial Sequence: Synthetic oligonucleotide
gagactgaggccaggcgcagtgg

SEQ ID NO: 2150 - DNA, 23 bp, Artificial Sequence
  Description of Artificial Sequence: Synthetic oligonucleotide
tcccaaagtgctggaatcaaagg

SEQ ID NO: 2151 - DNA, 23 bp, Artificial Sequence
  Description of Artificial Sequence: Synthetic oligonucleotide
tgcctttgattccagcactttgg

SEQ ID NO: 2152 - DNA, 23 bp, Artificial Sequence
  Description of Artificial Sequence: Synthetic oligonucleotide
ctcttggcctcccaaagtgctgg

SEQ ID NO: 2153 - DNA, 23 bp, Artificial Sequence
  Description of Artificial Sequence: Synthetic oligonucleotide
gcctttgattccagcactttggg

SEQ ID NO: 2154 - DNA, 23 bp, Artificial Sequence
  Description of Artificial Sequence: Synthetic oligonucleotide
tttgattccagcactttgggagg

SEQ ID NO: 2155 - DNA, 23 bp, Artificial Sequence
  Description of Artificial Sequence: Synthetic oligonucleotide
cagcactttgggaggccaagagg

SEQ ID NO: 2156 - DNA, 23 bp, Artificial Sequence
  Description of Artificial Sequence: Synthetic oligonucleotide
agcactttgggaggccaagaggg

SEQ ID NO: 2157 - DNA, 23 bp, Artificial Sequence
  Description of Artificial Sequence: Synthetic oligonucleotide
gcactttgggaggccaagagggg

SEQ ID NO: 2158 - DNA, 23 bp, Artificial Sequence
  Description of Artificial Sequence: Synthetic oligonucleotide
ctcaggtgatcgtcccctcttgg

SEQ ID NO: 2159 - DNA, 23 bp, Artificial Sequence
  Description of Artificial Sequence: Synthetic oligonucleotide
tggtctcgaattcttggctcagg

SEQ ID NO: 2160 - DNA, 23 bp, Artificial Sequence
  Description of Artificial Sequence: Synthetic oligonucleotide
ggctgctggtctcgaattcttgg

SEQ ID NO: 2161 - DNA, 23 bp, Artificial Sequence
  Description of Artificial Sequence: Synthetic oligonucleotide
cactatgttgcacgggctgctgg

SEQ ID NO: 2162 - DNA, 23 bp, Artificial Sequence
  Description of Artificial Sequence: Synthetic oligonucleotide
aaggtctcactatgttgcacggg

SEQ ID NO: 2163 - DNA, 23 bp, Artificial Sequence
  Description of Artificial Sequence: Synthetic oligonucleotide
caaggtctcactatgttgcacgg

SEQ ID NO: 2164 - DNA, 23 bp, Artificial Sequence
  Description of Artificial Sequence: Synthetic oligonucleotide
ctcacaatctttaagagacaagg

SEQ ID NO: 2165 - DNA, 23 bp, Artificial Sequence
  Description of Artificial Sequence: Synthetic oligonucleotide
tctcttaaagattgtgagactgg

SEQ ID NO: 2166 - DNA, 23 bp, Artificial Sequence
  Description of Artificial Sequence: Synthetic oligonucleotide
ctcttaaagattgtgagactggg

SEQ ID NO: 2167 - DNA, 23 bp, Artificial Sequence
  Description of Artificial Sequence: Synthetic oligonucleotide
taaagattgtgagactgggctgg

SEQ ID NO: 2168 - DNA, 23 bp, Artificial Sequence
  Description of Artificial Sequence: Synthetic oligonucleotide
aaagattgtgagactgggctggg

SEQ ID NO: 2169 - DNA, 23 bp, Artificial Sequence
  Description of Artificial Sequence: Synthetic oligonucleotide
ttgtgagactgggctgggcacgg

SEQ ID NO: 2170 - DNA, 23 bp, Artificial Sequence
  Description of Artificial Sequence: Synthetic oligonucleotide
tgagactgggctgggcacggtgg

SEQ ID NO: 2171 - DNA, 23 bp, Artificial Sequence
  Description of Artificial Sequence: Synthetic oligonucleotide
tcccaaagtgctaggattacagg

SEQ ID NO: 2172 - DNA, 23 bp, Artificial Sequence
  Description of Artificial Sequence: Synthetic oligonucleotide
ccttggcctcccaaagtgctagg

SEQ ID NO: 2173 - DNA, 23 bp, Artificial Sequence
  Description of Artificial Sequence: Synthetic oligonucleotide
cgcctgtaatcctagcactttgg

SEQ ID NO: 2174 - DNA, 23 bp, Artificial Sequence
  Description of Artificial Sequence: Synthetic oligonucleotide
gcctgtaatcctagcactttggg

SEQ ID NO: 2175 - DNA, 23 bp, Artificial Sequence
  Description of Artificial Sequence: Synthetic oligonucleotide
tgtaatcctagcactttgggagg

SEQ ID NO: 2176 - DNA, 23 bp, Artificial Sequence
  Description of Artificial Sequence: Synthetic oligonucleotide
cctagcactttgggaggccaagg

SEQ ID NO: 2177 - DNA, 23 bp, Artificial Sequence
  Description of Artificial Sequence: Synthetic oligonucleotide
gcactttgggaggccaaggcagg

SEQ ID NO: 2178 - DNA, 23 bp, Artificial Sequence
  Description of Artificial Sequence: Synthetic oligonucleotide
ctcagttgatccacctgccttgg

SEQ ID NO: 2179 - DNA, 23 bp, Artificial Sequence
  Description of Artificial Sequence: Synthetic oligonucleotide
ctttgggaggccaaggcaggtgg

SEQ ID NO: 2180 - DNA, 23 bp, Artificial Sequence
  Description of Artificial Sequence: Synthetic oligonucleotide
caaggcaggtggatcaactgagg

SEQ ID NO: 2181 - DNA, 23 bp, Artificial Sequence
  Description of Artificial Sequence: Synthetic oligonucleotide
caggtggatcaactgaggtcagg

SEQ ID NO: 2182 - DNA, 23 bp, Artificial Sequence
  Description of Artificial Sequence: Synthetic oligonucleotide
tcaggagtttgagatcagcctgg

SEQ ID NO: 2183 - DNA, 23 bp, Artificial Sequence
  Description of Artificial Sequence: Synthetic oligonucleotide
agagtttcactatgttagccagg

SEQ ID NO: 2184 - DNA, 23 bp, Artificial Sequence
  Description of Artificial Sequence: Synthetic oligonucleotide
aaaaatacaaaaaaattagctgg

SEQ ID NO: 2185 - DNA, 23 bp, Artificial Sequence
  Description of Artificial Sequence: Synthetic oligonucleotide
aaaatacaaaaaaattagctggg

SEQ ID NO: 2186 - DNA, 23 bp, Artificial Sequence
  Description of Artificial Sequence: Synthetic oligonucleotide
acaaaaaaattagctgggtgtgg

SEQ ID NO: 2187 - DNA, 23 bp, Artificial Sequence
  Description of Artificial Sequence: Synthetic oligonucleotide
aaaaaattagctgggtgtggtgg

SEQ ID NO: 2188 - DNA, 23 bp, Artificial Sequence
  Description of Artificial Sequence: Synthetic oligonucleotide
aaattagctgggtgtggtggtgg

SEQ ID NO: 2189 - DNA, 23 bp, Artificial Sequence
  Description of Artificial Sequence: Synthetic oligonucleotide
aattagctgggtgtggtggtggg

SEQ ID NO: 2190 - DNA, 23 bp, Artificial Sequence
  Description of Artificial Sequence: Synthetic oligonucleotide
tcctgagtagctgggattatagg

SEQ ID NO: 2191 - DNA, 23 bp, Artificial Sequence
  Description of Artificial Sequence: Synthetic oligonucleotide
cctcagcctcctgagtagctggg

SEQ ID NO: 2192 - DNA, 23 bp, Artificial Sequence
  Description of Artificial Sequence: Synthetic oligonucleotide
gcctcagcctcctgagtagctgg

SEQ ID NO: 2193 - DNA, 23 bp, Artificial Sequence
  Description of Artificial Sequence: Synthetic oligonucleotide
gcctataatcccagctactcagg

SEQ ID NO: 2194 - DNA, 23 bp, Artificial Sequence
  Description of Artificial Sequence: Synthetic oligonucleotide
tataatcccagctactcaggagg

SEQ ID NO: 2195 - DNA, 23 bp, Artificial Sequence
  Description of Artificial Sequence: Synthetic oligonucleotide
cccagctactcaggaggctgagg

SEQ ID NO: 2196 - DNA, 23 bp, Artificial Sequence
  Description of Artificial Sequence: Synthetic oligonucleotide
gctactcaggaggctgaggcagg

SEQ ID NO: 2197 - DNA, 23 bp, Artificial Sequence
  Description of Artificial Sequence: Synthetic oligonucleotide
caggagaatcgcttgtatccagg

SEQ ID NO: 2198 - DNA, 23 bp, Artificial Sequence
  Description of Artificial Sequence: Synthetic oligonucleotide
gagaatcgcttgtatccaggagg

SEQ ID NO: 2199 - DNA, 23 bp, Artificial Sequence
  Description of Artificial Sequence: Synthetic oligonucleotide
aatcgcttgtatccaggaggcgg

SEQ ID NO: 2200 - DNA, 23 bp, Artificial Sequence
  Description of Artificial Sequence: Synthetic oligonucleotide
tcactgcaacctccgcctcctgg

SEQ ID NO: 2201 - DNA, 23 bp, Artificial Sequence
  Description of Artificial Sequence: Synthetic oligonucleotide
cgcttgtatccaggaggcggagg

SEQ ID NO: 2202 - DNA, 23 bp, Artificial Sequence
  Description of Artificial Sequence: Synthetic oligonucleotide
aggttgcagtgagctgagatagg

SEQ ID NO: 2203 - DNA, 23 bp, Artificial Sequence
  Description of Artificial Sequence: Synthetic oligonucleotide
ggttgcagtgagctgagataggg

SEQ ID NO: 2204 - DNA, 23 bp, Artificial Sequence
  Description of Artificial Sequence: Synthetic oligonucleotide
ttgcccaggctggagtgcaacgg

SEQ ID NO: 2205 - DNA, 23 bp, Artificial Sequence
  Description of Artificial Sequence: Synthetic oligonucleotide
agggccgttgcactccagcctgg

SEQ ID NO: 2206 - DNA, 23 bp, Artificial Sequence
  Description of Artificial Sequence: Synthetic oligonucleotide
gggccgttgcactccagcctggg

SEQ ID NO: 2207 - DNA, 23 bp, Artificial Sequence
  Description of Artificial Sequence: Synthetic oligonucleotide
tttgctcttcttgcccaggctgg

SEQ ID NO: 2208 - DNA, 23 bp, Artificial Sequence
  Description of Artificial Sequence: Synthetic oligonucleotide
gagttttgctcttcttgcccagg

SEQ ID NO: 2209 - DNA, 23 bp, Artificial Sequence
  Description of Artificial Sequence: Synthetic oligonucleotide
ttatttatttatttttgagatgg

SEQ ID NO: 2210 - DNA, 23 bp, Artificial Sequence
  Description of Artificial Sequence: Synthetic oligonucleotide
tcatgagactgagacataacagg

SEQ ID NO: 2211 - DNA, 23 bp, Artificial Sequence
  Description of Artificial Sequence: Synthetic oligonucleotide
gagactgagacataacaggaagg

SEQ ID NO: 2212 - DNA, 23 bp, Artificial Sequence
  Description of Artificial Sequence: Synthetic oligonucleotide
actgagacataacaggaaggagg

SEQ ID NO: 2213 - DNA, 23 bp, Artificial Sequence
  Description of Artificial Sequence: Synthetic oligonucleotide
ctgagacataacaggaaggaggg

SEQ ID NO: 2214 - DNA, 23 bp, Artificial Sequence
  Description of Artificial Sequence: Synthetic oligonucleotide
taacaggaaggagggcaatttgg

SEQ ID NO: 2215 - DNA, 23 bp, Artificial Sequence
  Description of Artificial Sequence: Synthetic oligonucleotide
aggaaggagggcaatttggttgg

SEQ ID NO: 2216 - DNA, 23 bp, Artificial Sequence
  Description of Artificial Sequence: Synthetic oligonucleotide
gggcaatttggttggttccaagg

SEQ ID NO: 2217 - DNA, 23 bp, Artificial Sequence
  Description of Artificial Sequence: Synthetic oligonucleotide
atcacatactctaggaaccttgg

SEQ ID NO: 2218 - DNA, 23 bp, Artificial Sequence
  Description of Artificial Sequence: Synthetic oligonucleotide
cctctcccatcacatactctagg

SEQ ID NO: 2219 - DNA, 23 bp, Artificial Sequence
  Description of Artificial Sequence: Synthetic oligonucleotide
aaggttcctagagtatgtgatgg

SEQ ID NO: 2220 - DNA, 23 bp, Artificial Sequence
  Description of Artificial Sequence: Synthetic oligonucleotide
aggttcctagagtatgtgatggg

SEQ ID NO: 2221 - DNA, 23 bp, Artificial Sequence
  Description of Artificial Sequence: Synthetic oligonucleotide
cctagagtatgtgatgggagagg

SEQ ID NO: 2222 - DNA, 23 bp, Artificial Sequence
  Description of Artificial Sequence: Synthetic oligonucleotide
gagtatgtgatgggagaggttgg

SEQ ID NO: 2223 - DNA, 23 bp, Artificial Sequence
  Description of Artificial Sequence: Synthetic oligonucleotide
tgtgatgggagaggttggtgcgg

SEQ ID NO: 2224 - DNA, 23 bp, Artificial Sequence
  Description of Artificial Sequence: Synthetic oligonucleotide
gtgatgggagaggttggtgcggg

SEQ ID NO: 2225 - DNA, 23 bp, Artificial Sequence
  Description of Artificial Sequence: Synthetic oligonucleotide
atgggagaggttggtgcgggtgg

SEQ ID NO: 2226 - DNA, 23 bp, Artificial Sequence
  Description of Artificial Sequence: Synthetic oligonucleotide
tgggagaggttggtgcgggtggg

SEQ ID NO: 2227 - DNA, 23 bp, Artificial Sequence
  Description of Artificial Sequence: Synthetic oligonucleotide
gggagaggttggtgcgggtgggg

SEQ ID NO: 2228 - DNA, 23 bp, Artificial Sequence
  Description of Artificial Sequence: Synthetic oligonucleotide
ggttggtgcgggtggggccatgg

SEQ ID NO: 2229 - DNA, 23 bp, Artificial Sequence
  Description of Artificial Sequence: Synthetic oligonucleotide
tggtgcgggtggggccatggagg

SEQ ID NO: 2230 - DNA, 23 bp, Artificial Sequence
  Description of Artificial Sequence: Synthetic oligonucleotide
cacttgagtcagtacctccatgg

SEQ ID NO: 2231 - DNA, 23 bp, Artificial Sequence
  Description of Artificial Sequence: Synthetic oligonucleotide
catggaggtactgactcaagtgg

SEQ ID NO: 2232 - DNA, 23 bp, Artificial Sequence
  Description of Artificial Sequence: Synthetic oligonucleotide
ggaggtactgactcaagtggagg

SEQ ID NO: 2233 - DNA, 23 bp, Artificial Sequence
  Description of Artificial Sequence: Synthetic oligonucleotide
gaggtactgactcaagtggaggg

SEQ ID NO: 2234 - DNA, 23 bp, Artificial Sequence
  Description of Artificial Sequence: Synthetic oligonucleotide
actgactcaagtggagggacagg

SEQ ID NO: 2235 - DNA, 23 bp, Artificial Sequence
  Description of Artificial Sequence: Synthetic oligonucleotide
gactcaagtggagggacaggtgg

SEQ ID NO: 2236 - DNA, 23 bp, Artificial Sequence
  Description of Artificial Sequence: Synthetic oligonucleotide
actcaagtggagggacaggtggg

SEQ ID NO: 2237 - DNA, 23 bp, Artificial Sequence
  Description of Artificial Sequence: Synthetic oligonucleotide
ctcaagtggagggacaggtgggg

SEQ ID NO: 2238 - DNA, 23 bp, Artificial Sequence
  Description of Artificial Sequence: Synthetic oligonucleotide
tggagggacaggtggggaaatgg

SEQ ID NO: 2239 - DNA, 23 bp, Artificial Sequence
  Description of Artificial Sequence: Synthetic oligonucleotide
ggagggacaggtggggaaatggg

SEQ ID NO: 2240 - DNA, 23 bp, Artificial Sequence
  Description of Artificial Sequence: Synthetic oligonucleotide
ggacaggtggggaaatgggatgg

SEQ ID NO: 2241 - DNA, 23 bp, Artificial Sequence
  Description of Artificial Sequence: Synthetic oligonucleotide
gacaggtggggaaatgggatggg

SEQ ID NO: 2242 - DNA, 23 bp, Artificial Sequence
  Description of Artificial Sequence: Synthetic oligonucleotide
aaaagaagattgaccttagaagg

SEQ ID NO: 2243 - DNA, 23 bp, Artificial Sequence
  Description of Artificial Sequence: Synthetic oligonucleotide
aaagaagattgaccttagaaggg

SEQ ID NO: 2244 - DNA, 23 bp, Artificial Sequence
  Description of Artificial Sequence: Synthetic oligonucleotide
aagaagattgaccttagaagggg

SEQ ID NO: 2245 - DNA, 23 bp, Artificial Sequence
  Description of Artificial Sequence: Synthetic oligonucleotide
gaggttgagctccccttctaagg

SEQ ID NO: 2246 - DNA, 23 bp, Artificial Sequence
  Description of Artificial Sequence: Synthetic oligonucleotide
ggtctgaaattagggttcagagg

SEQ ID NO: 2247 - DNA, 23 bp, Artificial Sequence
  Description of Artificial Sequence: Synthetic oligonucleotide
ttttgaagggtctgaaattaggg

SEQ ID NO: 2248 - DNA, 23 bp, Artificial Sequence
  Description of Artificial Sequence: Synthetic oligonucleotide
attttgaagggtctgaaattagg

SEQ ID NO: 2249 - DNA, 23 bp, Artificial Sequence
  Description of Artificial Sequence: Synthetic oligonucleotide
agcttaatattcattttgaaggg

SEQ ID NO: 2250 - DNA, 23 bp, Artificial Sequence
  Description of Artificial Sequence: Synthetic oligonucleotide
gagcttaatattcattttgaagg

SEQ ID NO: 2251 - DNA, 23 bp, Artificial Sequence
  Description of Artificial Sequence: Synthetic oligonucleotide
aatgaatattaagctcattttgg

SEQ ID NO: 2252 - DNA, 23 bp, Artificial Sequence
  Description of Artificial Sequence: Synthetic oligonucleotide
aatgaacatgaaactcattttgg

SEQ ID NO: 2253 - DNA, 23 bp, Artificial Sequence
  Description of Artificial Sequence: Synthetic oligonucleotide
aaactcattttggtcttataagg

SEQ ID NO: 2254 - DNA, 23 bp, Artificial Sequence
  Description of Artificial Sequence: Synthetic oligonucleotide
agcagcttgaagtttagaagggg

SEQ ID NO: 2255 - DNA, 23 bp, Artificial Sequence
  Description of Artificial Sequence: Synthetic oligonucleotide
aagcagcttgaagtttagaaggg

SEQ ID NO: 2256 - DNA, 23 bp, Artificial Sequence
  Description of Artificial Sequence: Synthetic oligonucleotide
aaagcagcttgaagtttagaagg

SEQ ID NO: 2257 - DNA, 23 bp, Artificial Sequence
  Description of Artificial Sequence: Synthetic oligonucleotide
aaagtactgtgtgtatttgcagg

SEQ ID NO: 2258 - DNA, 23 bp, Artificial Sequence
  Description of Artificial Sequence: Synthetic oligonucleotide
tgcaaatacacacagtactttgg

SEQ ID NO: 2259 - DNA, 23 bp, Artificial Sequence
  Description of Artificial Sequence: Synthetic oligonucleotide
ttattctaatagaagccattagg

SEQ ID NO: 2260 - DNA, 23 bp, Artificial Sequence
  Description of Artificial Sequence: Synthetic oligonucleotide
tattctaatagaagccattaggg

SEQ ID NO: 2261 - DNA, 23 bp, Artificial Sequence
  Description of Artificial Sequence: Synthetic oligonucleotide
tattgaaactggttccctaatgg

SEQ ID NO: 2262 - DNA, 23 bp, Artificial Sequence
  Description of Artificial Sequence: Synthetic oligonucleotide
atttacctgtttattgaaactgg

SEQ ID NO: 2263 - DNA, 23 bp, Artificial Sequence
  Description of Artificial Sequence: Synthetic oligonucleotide
gggaaccagtttcaataaacagg

SEQ ID NO: 2264 - DNA, 23 bp, Artificial Sequence
  Description of Artificial Sequence: Synthetic oligonucleotide
tgtaagactagtttgtaattagg

SEQ ID NO: 2265 - DNA, 23 bp, Artificial Sequence
  Description of Artificial Sequence: Synthetic oligonucleotide
acagaggcaggaatggacactgg

SEQ ID NO: 2266 - DNA, 23 bp, Artificial Sequence
  Description of Artificial Sequence: Synthetic oligonucleotide
ttagataacagaggcaggaatgg

SEQ ID NO: 2267 - DNA, 23 bp, Artificial Sequence
  Description of Artificial Sequence: Synthetic oligonucleotide
gacatttagataacagaggcagg

SEQ ID NO: 2268 - DNA, 23 bp, Artificial Sequence
  Description of Artificial Sequence: Synthetic oligonucleotide
cccagacatttagataacagagg

SEQ ID NO: 2269 - DNA, 23 bp, Artificial Sequence
  Description of Artificial Sequence: Synthetic oligonucleotide
gcctctgttatctaaatgtctgg

SEQ ID NO: 2270 - DNA, 23 bp, Artificial Sequence
  Description of Artificial Sequence: Synthetic oligonucleotide
cctctgttatctaaatgtctggg

SEQ ID NO: 2271 - DNA, 23 bp, Artificial Sequence
  Description of Artificial Sequence: Synthetic oligonucleotide
tctacgtgaactcaactaattgg

SEQ ID NO: 2272 - DNA, 23 bp, Artificial Sequence
  Description of Artificial Sequence: Synthetic oligonucleotide
ttagttgagttcacgtagacagg

SEQ ID NO: 2273 - DNA, 23 bp, Artificial Sequence
  Description of Artificial Sequence: Synthetic oligonucleotide
ggctgtttctggggggcttaagg

SEQ ID NO: 2274 - DNA, 23 bp, Artificial Sequence
  Description of Artificial Sequence: Synthetic oligonucleotide
aaagacaggctgtttctgggggg

SEQ ID NO: 2275 - DNA, 23 bp, Artificial Sequence
  Description of Artificial Sequence: Synthetic oligonucleotide
caaagacaggctgtttctggggg

SEQ ID NO: 2276 - DNA, 23 bp, Artificial Sequence
  Description of Artificial Sequence: Synthetic oligonucleotide
ccaaagacaggctgtttctgggg

SEQ ID NO: 2277 - DNA, 23 bp, Artificial Sequence
  Description of Artificial Sequence: Synthetic oligonucleotide
cccaaagacaggctgtttctggg

SEQ ID NO: 2278 - DNA, 23 bp, Artificial Sequence
  Description of Artificial Sequence: Synthetic oligonucleotide
gcccaaagacaggctgtttctgg

SEQ ID NO: 2279 - DNA, 23 bp, Artificial Sequence
  Description of Artificial Sequence: Synthetic oligonucleotide
ccccagaaacagcctgtctttgg

SEQ ID NO: 2280 - DNA, 23 bp, Artificial Sequence
  Description of Artificial Sequence: Synthetic oligonucleotide
cccagaaacagcctgtctttggg

SEQ ID NO: 2281 - DNA, 23 bp, Artificial Sequence
  Description of Artificial Sequence: Synthetic oligonucleotide
atgtgggaaagcccaaagacagg

SEQ ID NO: 2282 - DNA, 23 bp, Artificial Sequence
  Description of Artificial Sequence: Synthetic oligonucleotide
gagaggacgaggaggcatgtggg

SEQ ID NO: 2283 - DNA, 23 bp, Artificial Sequence
  Description of Artificial Sequence: Synthetic oligonucleotide
ggagaggacgaggaggcatgtgg

SEQ ID NO: 2284 - DNA, 23 bp, Artificial Sequence
  Description of Artificial Sequence: Synthetic oligonucleotide
tacaggtggagaggacgaggagg

SEQ ID NO: 2285 - DNA, 23 bp, Artificial Sequence
  Description of Artificial Sequence: Synthetic oligonucleotide
atctacaggtggagaggacgagg

SEQ ID NO: 2286 - DNA, 23 bp, Artificial Sequence
  Description of Artificial Sequence: Synthetic oligonucleotide
cggtacatctacaggtggagagg

SEQ ID NO: 2287 - DNA, 23 bp, Artificial Sequence
  Description of Artificial Sequence: Synthetic oligonucleotide
gagcacggtacatctacaggtgg

SEQ ID NO: 2288 - DNA, 23 bp, Artificial Sequence
  Description of Artificial Sequence: Synthetic oligonucleotide
agagagcacggtacatctacagg

SEQ ID NO: 2289 - DNA, 23 bp, Artificial Sequence
  Description of Artificial Sequence: Synthetic oligonucleotide
cccttctctgacagagagcacgg

SEQ ID NO: 2290 - DNA, 23 bp, Artificial Sequence
  Description of Artificial Sequence: Synthetic oligonucleotide
accgtgctctctgtcagagaagg

SEQ ID NO: 2291 - DNA, 23 bp, Artificial Sequence
  Description of Artificial Sequence: Synthetic oligonucleotide
ccgtgctctctgtcagagaaggg

SEQ ID NO: 2292 - DNA, 23 bp, Artificial Sequence
  Description of Artificial Sequence: Synthetic oligonucleotide
tgctctctgtcagagaagggagg

SEQ ID NO: 2293 - DNA, 23 bp, Artificial Sequence
  Description of Artificial Sequence: Synthetic oligonucleotide
gctctctgtcagagaagggaggg

SEQ ID NO: 2294 - DNA, 23 bp, Artificial Sequence
  Description of Artificial Sequence: Synthetic oligonucleotide
ctgtcagagaagggagggtgtgg

SEQ ID NO: 2295 - DNA, 23 bp, Artificial Sequence
  Description of Artificial Sequence: Synthetic oligonucleotide
cagagaagggagggtgtggttgg

SEQ ID NO: 2296 - DNA, 23 bp, Artificial Sequence
  Description of Artificial Sequence: Synthetic oligonucleotide
agagaagggagggtgtggttggg

SEQ ID NO: 2297 - DNA, 23 bp, Artificial Sequence
  Description of Artificial Sequence: Synthetic oligonucleotide
aagggagggtgtggttgggctgg

SEQ ID NO: 2298 - DNA, 23 bp, Artificial Sequence
  Description of Artificial Sequence: Synthetic oligonucleotide
tggttgggctggacccccagagg

SEQ ID NO: 2299 - DNA, 23 bp, Artificial Sequence
  Description of Artificial Sequence: Synthetic oligonucleotide
gaaggagggatggcctctggggg

SEQ ID NO: 2300 - DNA, 23 bp, Artificial Sequence
  Description of Artificial Sequence: Synthetic oligonucleotide
agaaggagggatggcctctgggg

SEQ ID NO: 2301 - DNA, 23 bp, Artificial Sequence
  Description of Artificial Sequence: Synthetic oligonucleotide
cagaaggagggatggcctctggg

SEQ ID NO: 2302 - DNA, 23 bp, Artificial Sequence
  Description of Artificial Sequence: Synthetic oligonucleotide
acagaaggagggatggcctctgg

SEQ ID NO: 2303 - DNA, 23 bp, Artificial Sequence
  Description of Artificial Sequence: Synthetic oligonucleotide
gcagaagacagaaggagggatgg

SEQ ID NO: 2304 - DNA, 23 bp, Artificial Sequence
  Description of Artificial Sequence: Synthetic oligonucleotide
aggagcagaagacagaaggaggg

SEQ ID NO: 2305 - DNA, 23 bp, Artificial Sequence
  Description of Artificial Sequence: Synthetic oligonucleotide
caggagcagaagacagaaggagg

SEQ ID NO: 2306 - DNA, 23 bp, Artificial Sequence
  Description of Artificial Sequence: Synthetic oligonucleotide
ctgcaggagcagaagacagaagg

SEQ ID NO: 2307 - DNA, 23 bp, Artificial Sequence
  Description of Artificial Sequence: Synthetic oligonucleotide
agagtcccccgggcagacggagg

SEQ ID NO: 2308 - DNA, 23 bp, Artificial Sequence
  Description of Artificial Sequence: Synthetic oligonucleotide
tgagatgacctccgtctgcccgg

SEQ ID NO: 2309 - DNA, 23 bp, Artificial Sequence
  Description of Artificial Sequence: Synthetic oligonucleotide
ataagagtcccccgggcagacgg

SEQ ID NO: 2310 - DNA, 23 bp, Artificial Sequence
  Description of Artificial Sequence: Synthetic oligonucleotide
gagatgacctccgtctgcccggg

SEQ ID NO: 2311 - DNA, 23 bp, Artificial Sequence
  Description of Artificial Sequence: Synthetic oligonucleotide
agatgacctccgtctgcccgggg

SEQ ID NO: 2312 - DNA, 23 bp, Artificial Sequence
  Description of Artificial Sequence: Synthetic oligonucleotide
gatgacctccgtctgcccggggg

SEQ ID NO: 2313 - DNA, 23 bp, Artificial Sequence
  Description of Artificial Sequence: Synthetic oligonucleotide
gttccccataagagtcccccggg

SEQ ID NO: 2314 - DNA, 23 bp, Artificial Sequence
  Description of Artificial Sequence: Synthetic oligonucleotide
agttccccataagagtcccccgg

SEQ ID NO: 2315 - DNA, 23 bp, Artificial Sequence
  Description of Artificial Sequence: Synthetic oligonucleotide
gtctgcccgggggactcttatgg

SEQ ID NO: 2316 - DNA, 23 bp, Artificial Sequence
  Description of Artificial Sequence: Synthetic oligonucleotide
tctgcccgggggactcttatggg

SEQ ID NO: 2317 - DNA, 23 bp, Artificial Sequence
  Description of Artificial Sequence: Synthetic oligonucleotide
ctgcccgggggactcttatgggg

SEQ ID NO: 2318 - DNA, 23 bp, Artificial Sequence
  Description of Artificial Sequence: Synthetic oligonucleotide
gcccacccctcggggaagtaagg

SEQ ID NO: 2319 - DNA, 23 bp, Artificial Sequence
  Description of Artificial Sequence: Synthetic oligonucleotide
ggaactgccttacttccccgagg

SEQ ID NO: 2320 - DNA, 23 bp, Artificial Sequence
  Description of Artificial Sequence: Synthetic oligonucleotide
gaactgccttacttccccgaggg

SEQ ID NO: 2321 - DNA, 23 bp, Artificial Sequence
  Description of Artificial Sequence: Synthetic oligonucleotide
aactgccttacttccccgagggg

SEQ ID NO: 2322 - DNA, 23 bp, Artificial Sequence
  Description of Artificial Sequence: Synthetic oligonucleotide
ttcatcatgcccacccctcgggg

SEQ ID NO: 2323 - DNA, 23 bp, Artificial Sequence
  Description of Artificial Sequence: Synthetic oligonucleotide
tgccttacttccccgaggggtgg

SEQ ID NO: 2324 - DNA, 23 bp, Artificial Sequence
  Description of Artificial Sequence: Synthetic oligonucleotide
attcatcatgcccacccctcggg

SEQ ID NO: 2325 - DNA, 23 bp, Artificial Sequence
  Description of Artificial Sequence: Synthetic oligonucleotide
gccttacttccccgaggggtggg

SEQ ID NO: 2326 - DNA, 23 bp, Artificial Sequence
  Description of Artificial Sequence: Synthetic oligonucleotide
cattcatcatgcccacccctcgg

SEQ ID NO: 2327 - DNA, 23 bp, Artificial Sequence
  Description of Artificial Sequence: Synthetic oligonucleotide
cgaggggtgggcatgatgaatgg

SEQ ID NO: 2328 - DNA, 23 bp, Artificial Sequence
  Description of Artificial Sequence: Synthetic oligonucleotide
gaggggtgggcatgatgaatggg

SEQ ID NO: 2329 - DNA, 23 bp, Artificial Sequence
  Description of Artificial Sequence: Synthetic oligonucleotide
agaaagcttcctgaaacagtagg

SEQ ID NO: 2330 - DNA, 23 bp, Artificial Sequence
  Description of Artificial Sequence: Synthetic oligonucleotide
cagtcatttcctactgtttcagg

SEQ ID NO: 2331 - DNA, 23 bp, Artificial Sequence
  Description of Artificial Sequence: Synthetic oligonucleotide
cagccttttctaaggggttaagg

SEQ ID NO: 2332 - DNA, 23 bp, Artificial Sequence
  Description of Artificial Sequence: Synthetic oligonucleotide
gttccacagccttttctaagggg

SEQ ID NO: 2333 - DNA, 23 bp, Artificial Sequence
  Description of Artificial Sequence: Synthetic oligonucleotide
agttccacagccttttctaaggg

SEQ ID NO: 2334 - DNA, 23 bp, Artificial Sequence
  Description of Artificial Sequence: Synthetic oligonucleotide
tctccttaaccccttagaaaagg

SEQ ID NO: 2335 - DNA, 23 bp, Artificial Sequence
  Description of Artificial Sequence: Synthetic oligonucleotide
aagttccacagccttttctaagg

SEQ ID NO: 2336 - DNA, 23 bp, Artificial Sequence
  Description of Artificial Sequence: Synthetic oligonucleotide
taaccccttagaaaaggctgtgg

SEQ ID NO: 2337 - DNA, 23 bp, Artificial Sequence
  Description of Artificial Sequence: Synthetic oligonucleotide
gagctaaaatatgtcttaccagg

SEQ ID NO: 2338 - DNA, 23 bp, Artificial Sequence
  Description of Artificial Sequence: Synthetic oligonucleotide
ggggggcattagacgcaacctgg

SEQ ID NO: 2339 - DNA, 23 bp, Artificial Sequence
  Description of Artificial Sequence: Synthetic oligonucleotide
tctgcccagtagggaacgggggg

SEQ ID NO: 2340 - DNA, 23 bp, Artificial Sequence
  Description of Artificial Sequence: Synthetic oligonucleotide
ttctgcccagtagggaacggggg

SEQ ID NO: 2341 - DNA, 23 bp, Artificial Sequence
  Description of Artificial Sequence: Synthetic oligonucleotide
tttctgcccagtagggaacgggg

SEQ ID NO: 2342 - DNA, 23 bp, Artificial Sequence
  Description of Artificial Sequence: Synthetic oligonucleotide
ctttctgcccagtagggaacggg

SEQ ID NO: 2343 - DNA, 23 bp, Artificial Sequence
  Description of Artificial Sequence: Synthetic oligonucleotide
tctttctgcccagtagggaacgg

SEQ ID NO: 2344 - DNA, 23 bp, Artificial Sequence
  Description of Artificial Sequence: Synthetic oligonucleotide
taatgccccccgttccctactgg

SEQ ID NO: 2345 - DNA, 23 bp, Artificial Sequence
  Description of Artificial Sequence: Synthetic oligonucleotide
aatgccccccgttccctactggg

SEQ ID NO: 2346 - DNA, 23 bp, Artificial Sequence
  Description of Artificial Sequence: Synthetic oligonucleotide
ccaagtctttctgcccagtaggg

SEQ ID NO: 2347 - DNA, 23 bp, Artificial Sequence
  Description of Artificial Sequence: Synthetic oligonucleotide
cccaagtctttctgcccagtagg

SEQ ID NO: 2348 - DNA, 23 bp, Artificial Sequence
  Description of Artificial Sequence: Synthetic oligonucleotide
ccctactgggcagaaagacttgg

SEQ ID NO: 2349 - DNA, 23 bp, Artificial Sequence
  Description of Artificial Sequence: Synthetic oligonucleotide
cctactgggcagaaagacttggg

SEQ ID NO: 2350 - DNA, 23 bp, Artificial Sequence
  Description of Artificial Sequence: Synthetic oligonucleotide
aaagacttgggtgcttcctgagg

SEQ ID NO: 2351 - DNA, 23 bp, Artificial Sequence
  Description of Artificial Sequence: Synthetic oligonucleotide
gacttgggtgcttcctgaggagg

SEQ ID NO: 2352 - DNA, 23 bp, Artificial Sequence
  Description of Artificial Sequence: Synthetic oligonucleotide
acttgggtgcttcctgaggaggg

SEQ ID NO: 2353 - DNA, 23 bp, Artificial Sequence
  Description of Artificial Sequence: Synthetic oligonucleotide
tctgccaaggatccctcctcagg

SEQ ID NO: 2354 - DNA, 23 bp, Artificial Sequence
  Description of Artificial Sequence: Synthetic oligonucleotide
gcttcctgaggagggatccttgg

SEQ ID NO: 2355 - DNA, 23 bp, Artificial Sequence
  Description of Artificial Sequence: Synthetic oligonucleotide
cccaggcctctcttctgccaagg

SEQ ID NO: 2356 - DNA, 23 bp, Artificial Sequence
  Description of Artificial Sequence: Synthetic oligonucleotide
agggatccttggcagaagagagg

SEQ ID NO: 2357 - DNA, 23 bp, Artificial Sequence
  Description of Artificial Sequence: Synthetic oligonucleotide
tccttggcagaagagaggcctgg

SEQ ID NO: 2358 - DNA, 23 bp, Artificial Sequence
  Description of Artificial Sequence: Synthetic oligonucleotide
ccttggcagaagagaggcctggg

SEQ ID NO: 2359 - DNA, 23 bp, Artificial Sequence
  Description of Artificial Sequence: Synthetic oligonucleotide
ttctcagccctcgtgagcccagg

SEQ ID NO: 2360 - DNA, 23 bp, Artificial Sequence
  Description of Artificial Sequence: Synthetic oligonucleotide
aagagaggcctgggctcacgagg

SEQ ID NO: 2361 - DNA, 23 bp, Artificial Sequence
  Description of Artificial Sequence: Synthetic oligonucleotide
agagaggcctgggctcacgaggg

SEQ ID NO: 2362 - DNA, 23 bp, Artificial Sequence
  Description of Artificial Sequence: Synthetic oligonucleotide
agatgggtccttgcaactctggg

SEQ ID NO: 2363 - DNA, 23 bp, Artificial Sequence
  Description of Artificial Sequence: Synthetic oligonucleotide
gagatgggtccttgcaactctgg

SEQ ID NO: 2364 - DNA, 23 bp, Artificial Sequence
  Description of Artificial Sequence: Synthetic oligonucleotide
acatgtttcccagagttgcaagg

SEQ ID NO: 2365 - DNA, 23 bp, Artificial Sequence
  Description of Artificial Sequence: Synthetic oligonucleotide
agactctgtgtttaagagatggg

SEQ ID NO: 2366 - DNA, 23 bp, Artificial Sequence
  Description of Artificial Sequence: Synthetic oligonucleotide
cagactctgtgtttaagagatgg

SEQ ID NO: 2367 - DNA, 23 bp, Artificial Sequence
  Description of Artificial Sequence: Synthetic oligonucleotide
aaggacagggtgtcagttagggg

SEQ ID NO: 2368 - DNA, 23 bp, Artificial Sequence
  Description of Artificial Sequence: Synthetic oligonucleotide
gaaggacagggtgtcagttaggg

SEQ ID NO: 2369 - DNA, 23 bp, Artificial Sequence
  Description of Artificial Sequence: Synthetic oligonucleotide
ggaaggacagggtgtcagttagg

SEQ ID NO: 2370 - DNA, 23 bp, Artificial Sequence
  Description of Artificial Sequence: Synthetic oligonucleotide
agggccatgcagtatggctgggg

SEQ ID NO: 2371 - DNA, 23 bp, Artificial Sequence
  Description of Artificial Sequence: Synthetic oligonucleotide
aagggccatgcagtatggctggg

SEQ ID NO: 2372 - DNA, 23 bp, Artificial Sequence
  Description of Artificial Sequence: Synthetic oligonucleotide
caagggccatgcagtatggctgg

SEQ ID NO: 2373 - DNA, 23 bp, Artificial Sequence
  Description of Artificial Sequence: Synthetic oligonucleotide
gcaccaagggccatgcagtatgg

SEQ ID NO: 2374 - DNA, 23 bp, Artificial Sequence
  Description of Artificial Sequence: Synthetic oligonucleotide
ggatccccagccatactgcatgg

SEQ ID NO: 2375 - DNA, 23 bp, Artificial Sequence
  Description of Artificial Sequence: Synthetic oligonucleotide
cagccatactgcatggcccttgg

SEQ ID NO: 2376 - DNA, 23 bp, Artificial Sequence
  Description of Artificial Sequence: Synthetic oligonucleotide
atgggttcattatgcaccaaggg

SEQ ID NO: 2377 - DNA, 23 bp, Artificial Sequence
  Description of Artificial Sequence: Synthetic oligonucleotide
aatgggttcattatgcaccaagg

SEQ ID NO: 2378 - DNA, 23 bp, Artificial Sequence
  Description of Artificial Sequence: Synthetic oligonucleotide
cccacacatggaacagaaatggg

SEQ ID NO: 2379 - DNA, 23 bp, Artificial Sequence
  Description of Artificial Sequence: Synthetic oligonucleotide
gcccacacatggaacagaaatgg

SEQ ID NO: 2380 - DNA, 23 bp, Artificial Sequence
  Description of Artificial Sequence: Synthetic oligonucleotide
acccatttctgttccatgtgtgg

SEQ ID NO: 2381 - DNA, 23 bp, Artificial Sequence
  Description of Artificial Sequence: Synthetic oligonucleotide
cccatttctgttccatgtgtggg

SEQ ID NO: 2382 - DNA, 23 bp, Artificial Sequence
  Description of Artificial Sequence: Synthetic oligonucleotide
cccagaaaccagcccacacatgg

SEQ ID NO: 2383 - DNA, 23 bp, Artificial Sequence
  Description of Artificial Sequence: Synthetic oligonucleotide
tttctgttccatgtgtgggctgg

SEQ ID NO: 2384 - DNA, 23 bp, Artificial Sequence
  Description of Artificial Sequence: Synthetic oligonucleotide
tccatgtgtgggctggtttctgg

SEQ ID NO: 2385 - DNA, 23 bp, Artificial Sequence
  Description of Artificial Sequence: Synthetic oligonucleotide
ccatgtgtgggctggtttctggg

SEQ ID NO: 2386 - DNA, 23 bp, Artificial Sequence
  Description of Artificial Sequence: Synthetic oligonucleotide
catgtgtgggctggtttctgggg

SEQ ID NO: 2387 - DNA, 23 bp, Artificial Sequence
  Description of Artificial Sequence: Synthetic oligonucleotide
gaagcaggcacaaagagggtggg

SEQ ID NO: 2388 - DNA, 23 bp, Artificial Sequence
  Description of Artificial Sequence: Synthetic oligonucleotide
agaagcaggcacaaagagggtgg

SEQ ID NO: 2389 - DNA, 23 bp, Artificial Sequence
  Description of Artificial Sequence: Synthetic oligonucleotide
aggagaagcaggcacaaagaggg

SEQ ID NO: 2390 - DNA, 23 bp, Artificial Sequence
  Description of Artificial Sequence: Synthetic oligonucleotide
aaggagaagcaggcacaaagagg

SEQ ID NO: 2391 - DNA, 23 bp, Artificial Sequence
  Description of Artificial Sequence: Synthetic oligonucleotide
tagagggcccaaggagaagcagg

SEQ ID NO: 2392 - DNA, 23 bp, Artificial Sequence
  Description of Artificial Sequence: Synthetic oligonucleotide
tctttgtgcctgcttctccttgg

SEQ ID NO: 2393 - DNA, 23 bp, Artificial Sequence
  Description of Artificial Sequence: Synthetic oligonucleotide
ctttgtgcctgcttctccttggg

SEQ ID NO: 2394 - DNA, 23 bp, Artificial Sequence
  Description of Artificial Sequence: Synthetic oligonucleotide
gctgtggaatagagggcccaagg

SEQ ID NO: 2395 - DNA, 23 bp, Artificial Sequence
  Description of Artificial Sequence: Synthetic oligonucleotide
tccacaagctgtggaatagaggg

SEQ ID NO: 2396 - DNA, 23 bp, Artificial Sequence
  Description of Artificial Sequence: Synthetic oligonucleotide
ttccacaagctgtggaatagagg

SEQ ID NO: 2397 - DNA, 23 bp, Artificial Sequence
  Description of Artificial Sequence: Synthetic oligonucleotide
aatgtgggttccacaagctgtgg

SEQ ID NO: 2398 - DNA, 23 bp, Artificial Sequence
  Description of Artificial Sequence: Synthetic oligonucleotide
gccctctattccacagcttgtgg

SEQ ID NO: 2399 - DNA, 23 bp, Artificial Sequence
  Description of Artificial Sequence: Synthetic oligonucleotide
caaacacagtagcaaaatgtggg

SEQ ID NO: 2400 - DNA, 23 bp, Artificial Sequence
  Description of Artificial Sequence: Synthetic oligonucleotide
tcaaacacagtagcaaaatgtgg

SEQ ID NO: 2401 - DNA, 23 bp, Artificial Sequence
  Description of Artificial Sequence: Synthetic oligonucleotide
aaaacactgttttctcctcccgg

SEQ ID NO: 2402 - DNA, 23 bp, Artificial Sequence
  Description of Artificial Sequence: Synthetic oligonucleotide
aaacactgttttctcctcccggg

SEQ ID NO: 2403 - DNA, 23 bp, Artificial Sequence
  Description of Artificial Sequence: Synthetic oligonucleotide
aacactgttttctcctcccgggg

SEQ ID NO: 2404 - DNA, 23 bp, Artificial Sequence
  Description of Artificial Sequence: Synthetic oligonucleotide
catagtcccaaagccccgggagg

SEQ ID NO: 2405 - DNA, 23 bp, Artificial Sequence
  Description of Artificial Sequence: Synthetic oligonucleotide
aggcatagtcccaaagccccggg

SEQ ID NO: 2406 - DNA, 23 bp, Artificial Sequence
  Description of Artificial Sequence: Synthetic oligonucleotide
gttttctcctcccggggctttgg

SEQ ID NO: 2407 - DNA, 23 bp, Artificial Sequence
  Description of Artificial Sequence: Synthetic oligonucleotide
gaggcatagtcccaaagccccgg

SEQ ID NO: 2408 - DNA, 23 bp, Artificial Sequence
  Description of Artificial Sequence: Synthetic oligonucleotide
ttttctcctcccggggctttggg

SEQ ID NO: 2409 - DNA, 23 bp, Artificial Sequence
  Description of Artificial Sequence: Synthetic oligonucleotide
atgagcagtcaacacaacagagg

SEQ ID NO: 2410 - DNA, 23 bp, Artificial Sequence
  Description of Artificial Sequence: Synthetic oligonucleotide
gctcatccttgctgcttctctgg

SEQ ID NO: 2411 - DNA, 23 bp, Artificial Sequence
  Description of Artificial Sequence: Synthetic oligonucleotide
ctcatccttgctgcttctctggg

SEQ ID NO: 2412 - DNA, 23 bp, Artificial Sequence
  Description of Artificial Sequence: Synthetic oligonucleotide
caagcctgggcctccacccaggg

SEQ ID NO: 2413 - DNA, 23 bp, Artificial Sequence
  Description of Artificial Sequence: Synthetic oligonucleotide
taagggactgccctgggtggagg

SEQ ID NO: 2414 - DNA, 23 bp, Artificial Sequence
  Description of Artificial Sequence: Synthetic oligonucleotide
ccaagcctgggcctccacccagg

SEQ ID NO: 2415 - DNA, 23 bp, Artificial Sequence
  Description of Artificial Sequence: Synthetic oligonucleotide
actgccctgggtggaggcccagg

SEQ ID NO: 2416 - DNA, 23 bp, Artificial Sequence
  Description of Artificial Sequence: Synthetic oligonucleotide
cctgggtggaggcccaggcttgg

SEQ ID NO: 2417 - DNA, 23 bp, Artificial Sequence
  Description of Artificial Sequence: Synthetic oligonucleotide
ctgggtggaggcccaggcttggg

SEQ ID NO: 2418 - DNA, 23 bp, Artificial Sequence
  Description of Artificial Sequence: Synthetic oligonucleotide
aggcaatgtgtcccaagcctggg

SEQ ID NO: 2419 - DNA, 23 bp, Artificial Sequence
  Description of Artificial Sequence: Synthetic oligonucleotide
gaggcaatgtgtcccaagcctgg

SEQ ID NO: 2420 - DNA, 23 bp, Artificial Sequence
  Description of Artificial Sequence: Synthetic oligonucleotide
gggacacattgcctcccaagagg

SEQ ID NO: 2421 - DNA, 23 bp, Artificial Sequence
  Description of Artificial Sequence: Synthetic oligonucleotide
cctgctaggcccctcttgggagg

SEQ ID NO: 2422 - DNA, 23 bp, Artificial Sequence
  Description of Artificial Sequence: Synthetic oligonucleotide
ggacacattgcctcccaagaggg

SEQ ID NO: 2423 - DNA, 23 bp, Artificial Sequence
  Description of Artificial Sequence: Synthetic oligonucleotide
gacacattgcctcccaagagggg

SEQ ID NO: 2424 - DNA, 23 bp, Artificial Sequence
  Description of Artificial Sequence: Synthetic oligonucleotide
gttcctgctaggcccctcttggg

SEQ ID NO: 2425 - DNA, 23 bp, Artificial Sequence
  Description of Artificial Sequence: Synthetic oligonucleotide
agttcctgctaggcccctcttgg

SEQ ID NO: 2426 - DNA, 23 bp, Artificial Sequence
  Description of Artificial Sequence: Synthetic oligonucleotide
cctcccaagaggggcctagcagg

SEQ ID NO: 2427 - DNA, 23 bp, Artificial Sequence
  Description of Artificial Sequence: Synthetic oligonucleotide
cctgcagaagagttcctgctagg

SEQ ID NO: 2428 - DNA, 23 bp, Artificial Sequence
  Description of Artificial Sequence: Synthetic oligonucleotide
cctagcaggaactcttctgcagg

SEQ ID NO: 2429 - DNA, 23 bp, Artificial Sequence
  Description of Artificial Sequence: Synthetic oligonucleotide
caggaactcttctgcaggagagg

SEQ ID NO: 2430 - DNA, 23 bp, Artificial Sequence
  Description of Artificial Sequence: Synthetic oligonucleotide
ctcttctgcaggagaggtagagg

SEQ ID NO: 2431 - DNA, 23 bp, Artificial Sequence
  Description of Artificial Sequence: Synthetic oligonucleotide
tctgcaggagaggtagaggatgg

SEQ ID NO: 2432 - DNA, 23 bp, Artificial Sequence
  Description of Artificial Sequence: Synthetic oligonucleotide
aggtagaggatggctcctgtagg

SEQ ID NO: 2433 - DNA, 23 bp, Artificial Sequence
  Description of Artificial Sequence: Synthetic oligonucleotide
ggtagaggatggctcctgtaggg

SEQ ID NO: 2434 - DNA, 23 bp, Artificial Sequence
  Description of Artificial Sequence: Synthetic oligonucleotide
gtagaggatggctcctgtagggg

SEQ ID NO: 2435 - DNA, 23 bp, Artificial Sequence
  Description of Artificial Sequence: Synthetic oligonucleotide
cctgctctatgttcccctacagg

SEQ ID NO: 2436 - DNA, 23 bp, Artificial Sequence
  Description of Artificial Sequence: Synthetic oligonucleotide
cctgtaggggaacatagagcagg

SEQ ID NO: 2437 - DNA, 23 bp, Artificial Sequence
  Description of Artificial Sequence: Synthetic oligonucleotide
ccatgttcaagggcattcagggg

SEQ ID NO: 2438 - DNA, 23 bp, Artificial Sequence
  Description of Artificial Sequence: Synthetic oligonucleotide
tccatgttcaagggcattcaggg

SEQ ID NO: 2439 - DNA, 23 bp, Artificial Sequence
  Description of Artificial Sequence: Synthetic oligonucleotide
ctccatgttcaagggcattcagg

SEQ ID NO: 2440 - DNA, 23 bp, Artificial Sequence
  Description of Artificial Sequence: Synthetic oligonucleotide
aatgaattctccatgttcaaggg

SEQ ID NO: 2441 - DNA, 23 bp, Artificial Sequence
  Description of Artificial Sequence: Synthetic oligonucleotide
cccctgaatgcccttgaacatgg

SEQ ID NO: 2442 - DNA, 23 bp, Artificial Sequence
  Description of Artificial Sequence: Synthetic oligonucleotide
caatgaattctccatgttcaagg

SEQ ID NO: 2443 - DNA, 23 bp, Artificial Sequence
  Description of Artificial Sequence: Synthetic oligonucleotide
gttaggtcaagctgaatgtctgg

SEQ ID NO: 2444 - DNA, 23 bp, Artificial Sequence
  Description of Artificial Sequence: Synthetic oligonucleotide
gatggagaatttcacaggttagg

SEQ ID NO: 2445 - DNA, 23 bp, Artificial Sequence
  Description of Artificial Sequence: Synthetic oligonucleotide
aagaagatggagaatttcacagg

SEQ ID NO: 2446 - DNA, 23 bp, Artificial Sequence
  Description of Artificial Sequence: Synthetic oligonucleotide
ggaacactttataaagaagatgg

SEQ ID NO: 2447 - DNA, 23 bp, Artificial Sequence
  Description of Artificial Sequence: Synthetic oligonucleotide
tttccaggggaggcaaggaaggg

SEQ ID NO: 2448 - DNA, 23 bp, Artificial Sequence
  Description of Artificial Sequence: Synthetic oligonucleotide
ctttccaggggaggcaaggaagg

SEQ ID NO: 2449 - DNA, 23 bp, Artificial Sequence
  Description of Artificial Sequence: Synthetic oligonucleotide
tgacctttccaggggaggcaagg

SEQ ID NO: 2450 - DNA, 23 bp, Artificial Sequence
  Description of Artificial Sequence: Synthetic oligonucleotide
gttcccttccttgcctcccctgg

SEQ ID NO: 2451 - DNA, 23 bp, Artificial Sequence
  Description of Artificial Sequence: Synthetic oligonucleotide
accactgacctttccaggggagg

SEQ ID NO: 2452 - DNA, 23 bp, Artificial Sequence
  Description of Artificial Sequence: Synthetic oligonucleotide
cttccttgcctcccctggaaagg

SEQ ID NO: 2453 - DNA, 23 bp, Artificial Sequence
  Description of Artificial Sequence: Synthetic oligonucleotide
cacaccactgacctttccagggg

SEQ ID NO: 2454 - DNA, 23 bp, Artificial Sequence
  Description of Artificial Sequence: Synthetic oligonucleotide
acacaccactgacctttccaggg

SEQ ID NO: 2455 - DNA, 23 bp, Artificial Sequence
  Description of Artificial Sequence: Synthetic oligonucleotide
cacacaccactgacctttccagg

SEQ ID NO: 2456 - DNA, 23 bp, Artificial Sequence
  Description of Artificial Sequence: Synthetic oligonucleotide
gcctcccctggaaaggtcagtgg

SEQ ID NO: 2457 - DNA, 23 bp, Artificial Sequence
  Description of Artificial Sequence: Synthetic oligonucleotide
ctggaaaggtcagtggtgtgtgg

SEQ ID NO: 2458 - DNA, 23 bp, Artificial Sequence
  Description of Artificial Sequence: Synthetic oligonucleotide
agtgcaggtccagggctcagagg

SEQ ID NO: 2459 - DNA, 23 bp, Artificial Sequence
  Description of Artificial Sequence: Synthetic oligonucleotide
gcacagtgtcctctgagccctgg

SEQ ID NO: 2460 - DNA, 23 bp, Artificial Sequence
  Description of Artificial Sequence: Synthetic oligonucleotide
gaagccacagtgcaggtccaggg

SEQ ID NO: 2461 - DNA, 23 bp, Artificial Sequence
  Description of Artificial Sequence: Synthetic oligonucleotide
ggaagccacagtgcaggtccagg

SEQ ID NO: 2462 - DNA, 23 bp, Artificial Sequence
  Description of Artificial Sequence: Synthetic oligonucleotide
tgagccctggacctgcactgtgg

SEQ ID NO: 2463 - DNA, 23 bp, Artificial Sequence
  Description of Artificial Sequence: Synthetic oligonucleotide
acctctggaagccacagtgcagg

SEQ ID NO: 2464 - DNA, 23 bp, Artificial Sequence
  Description of Artificial Sequence: Synthetic oligonucleotide
acctgcactgtggcttccagagg

SEQ ID NO: 2465 - DNA, 23 bp, Artificial Sequence
  Description of Artificial Sequence: Synthetic oligonucleotide
tgcactgtggcttccagaggtgg

SEQ ID NO: 2466 - DNA, 23 bp, Artificial Sequence
  Description of Artificial Sequence: Synthetic oligonucleotide
catgtgggaactgccacctctgg

SEQ ID NO: 2467 - DNA, 23 bp, Artificial Sequence
  Description of Artificial Sequence: Synthetic oligonucleotide
cagaggtggcagttcccacatgg

SEQ ID NO: 2468 - DNA, 23 bp, Artificial Sequence
  Description of Artificial Sequence: Synthetic oligonucleotide
agaggtggcagttcccacatggg

SEQ ID NO: 2469 - DNA, 23 bp, Artificial Sequence
  Description of Artificial Sequence: Synthetic oligonucleotide
gaggtggcagttcccacatgggg

SEQ ID NO: 2470 - DNA, 23 bp, Artificial Sequence
  Description of Artificial Sequence: Synthetic oligonucleotide
tttattctagtaccccatgtggg

SEQ ID NO: 2471 - DNA, 23 bp, Artificial Sequence
  Description of Artificial Sequence: Synthetic oligonucleotide
atttattctagtaccccatgtgg

SEQ ID NO: 2472 - DNA, 23 bp, Artificial Sequence
  Description of Artificial Sequence: Synthetic oligonucleotide
acatggggtactagaataaatgg

SEQ ID NO: 2473 - DNA, 23 bp, Artificial Sequence
  Description of Artificial Sequence: Synthetic oligonucleotide
actagaataaatggcctatcagg

SEQ ID NO: 2474 - DNA, 23 bp, Artificial Sequence
  Description of Artificial Sequence: Synthetic oligonucleotide
caaagcacacacagcctgatagg

SEQ ID NO: 2475 - DNA, 23 bp, Artificial Sequence
  Description of Artificial Sequence: Synthetic oligonucleotide
ctatcaggctgtgtgtgctttgg

SEQ ID NO: 2476 - DNA, 23 bp, Artificial Sequence
  Description of Artificial Sequence: Synthetic oligonucleotide
tatcaggctgtgtgtgctttggg

SEQ ID NO: 2477 - DNA, 23 bp, Artificial Sequence
  Description of Artificial Sequence: Synthetic oligonucleotide
ggatcacatgtccccaccctagg

SEQ ID NO: 2478 - DNA, 23 bp, Artificial Sequence
  Description of Artificial Sequence: Synthetic oligonucleotide
ggaaccagggtcctagggtgggg

SEQ ID NO: 2479 - DNA, 23 bp, Artificial Sequence
  Description of Artificial Sequence: Synthetic oligonucleotide
tggaaccagggtcctagggtggg

SEQ ID NO: 2480 - DNA, 23 bp, Artificial Sequence
  Description of Artificial Sequence: Synthetic oligonucleotide
ttggaaccagggtcctagggtgg

SEQ ID NO: 2481 - DNA, 23 bp, Artificial Sequence
  Description of Artificial Sequence: Synthetic oligonucleotide
tggttggaaccagggtcctaggg

SEQ ID NO: 2482 - DNA, 23 bp, Artificial Sequence
  Description of Artificial Sequence: Synthetic oligonucleotide
atggttggaaccagggtcctagg

SEQ ID NO: 2483 - DNA, 23 bp, Artificial Sequence
  Description of Artificial Sequence: Synthetic oligonucleotide
atgtccccaccctaggaccctgg

SEQ ID NO: 2484 - DNA, 23 bp, Artificial Sequence
  Description of Artificial Sequence: Synthetic oligonucleotide
catgcgtatggttggaaccaggg

SEQ ID NO: 2485 - DNA, 23 bp, Artificial Sequence
  Description of Artificial Sequence: Synthetic oligonucleotide
acatgcgtatggttggaaccagg

SEQ ID NO: 2486 - DNA, 23 bp, Artificial Sequence
  Description of Artificial Sequence: Synthetic oligonucleotide
caagagaacatgcgtatggttgg

SEQ ID NO: 2487 - DNA, 23 bp, Artificial Sequence
  Description of Artificial Sequence: Synthetic oligonucleotide
gctccaagagaacatgcgtatgg

SEQ ID NO: 2488 - DNA, 23 bp, Artificial Sequence
  Description of Artificial Sequence: Synthetic oligonucleotide
caaccatacgcatgttctcttgg

SEQ ID NO: 2489 - DNA, 23 bp, Artificial Sequence
  Description of Artificial Sequence: Synthetic oligonucleotide
ggtggcttctctgctgttctggg

SEQ ID NO: 2490 - DNA, 23 bp, Artificial Sequence
  Description of Artificial Sequence: Synthetic oligonucleotide
tggtggcttctctgctgttctgg

SEQ ID NO: 2491 - DNA, 23 bp, Artificial Sequence
  Description of Artificial Sequence: Synthetic oligonucleotide
cagcagagaagccaccagtgtgg

SEQ ID NO: 2492 - DNA, 23 bp, Artificial Sequence
  Description of Artificial Sequence: Synthetic oligonucleotide
gacttctgtgtccacactggtgg

SEQ ID NO: 2493 - DNA, 23 bp, Artificial Sequence
  Description of Artificial Sequence: Synthetic oligonucleotide
cttgacttctgtgtccacactgg

SEQ ID NO: 2494 - DNA, 23 bp, Artificial Sequence
  Description of Artificial Sequence: Synthetic oligonucleotide
cagtgtggacacagaagtcaagg

SEQ ID NO: 2495 - DNA, 23 bp, Artificial Sequence
  Description of Artificial Sequence: Synthetic oligonucleotide
agtgtggacacagaagtcaaggg

SEQ ID NO: 2496 - DNA, 23 bp, Artificial Sequence
  Description of Artificial Sequence: Synthetic oligonucleotide
caagggtctgatttccagcctgg

SEQ ID NO: 2497 - DNA, 23 bp, Artificial Sequence
  Description of Artificial Sequence: Synthetic oligonucleotide
agagcagtcagaagccaggctgg

SEQ ID NO: 2498 - DNA, 23 bp, Artificial Sequence
  Description of Artificial Sequence: Synthetic oligonucleotide
ccccagagcagtcagaagccagg

SEQ ID NO: 2499 - DNA, 23 bp, Artificial Sequence
  Description of Artificial Sequence: Synthetic oligonucleotide
agcctggcttctgactgctctgg

SEQ ID NO: 2500 - DNA, 23 bp, Artificial Sequence
  Description of Artificial Sequence: Synthetic oligonucleotide
gcctggcttctgactgctctggg

SEQ ID NO: 2501 - DNA, 23 bp, Artificial Sequence
  Description of Artificial Sequence: Synthetic oligonucleotide
cctggcttctgactgctctgggg

SEQ ID NO: 2502 - DNA, 23 bp, Artificial Sequence
  Description of Artificial Sequence: Synthetic oligonucleotide
tctgactgctctggggccgcagg

SEQ ID NO: 2503 - DNA, 23 bp, Artificial Sequence
  Description of Artificial Sequence: Synthetic oligonucleotide
gggaaggaaccgtattcctgcgg

SEQ ID NO: 2504 - DNA, 23 bp, Artificial Sequence
  Description of Artificial Sequence: Synthetic oligonucleotide
gctctggggccgcaggaatacgg

SEQ ID NO: 2505 - DNA, 23 bp, Artificial Sequence
  Description of Artificial Sequence: Synthetic oligonucleotide
tgcctgctgggcatgggggaagg

SEQ ID NO: 2506 - DNA, 23 bp, Artificial Sequence
  Description of Artificial Sequence: Synthetic oligonucleotide
caaatgcctgctgggcatggggg

SEQ ID NO: 2507 - DNA, 23 bp, Artificial Sequence
  Description of Artificial Sequence: Synthetic oligonucleotide
acaaatgcctgctgggcatgggg

SEQ ID NO: 2508 - DNA, 23 bp, Artificial Sequence
  Description of Artificial Sequence: Synthetic oligonucleotide
gacaaatgcctgctgggcatggg

SEQ ID NO: 2509 - DNA, 23 bp, Artificial Sequence
  Description of Artificial Sequence: Synthetic oligonucleotide
agacaaatgcctgctgggcatgg

SEQ ID NO: 2510 - DNA, 23 bp, Artificial Sequence
  Description of Artificial Sequence: Synthetic oligonucleotide
ttccttcccccatgcccagcagg

SEQ ID NO: 2511 - DNA, 23 bp, Artificial Sequence
  Description of Artificial Sequence: Synthetic oligonucleotide
ttgtaagacaaatgcctgctggg

SEQ ID NO: 2512 - DNA, 23 bp, Artificial Sequence
  Description of Artificial Sequence: Synthetic oligonucleotide
gttgtaagacaaatgcctgctgg

SEQ ID NO: 2513 - DNA, 23 bp, Artificial Sequence
  Description of Artificial Sequence: Synthetic oligonucleotide
gcaggcatttgtcttacaactgg

SEQ ID NO: 2514 - DNA, 23 bp, Artificial Sequence
  Description of Artificial Sequence: Synthetic oligonucleotide
ggcatttgtcttacaactggagg

SEQ ID NO: 2515 - DNA, 23 bp, Artificial Sequence
  Description of Artificial Sequence: Synthetic oligonucleotide
gcatttgtcttacaactggaggg

SEQ ID NO: 2516 - DNA, 23 bp, Artificial Sequence
  Description of Artificial Sequence: Synthetic oligonucleotide
catttgtcttacaactggagggg

SEQ ID NO: 2517 - DNA, 23 bp, Artificial Sequence
  Description of Artificial Sequence: Synthetic oligonucleotide
tgtcttacaactggaggggaagg

SEQ ID NO: 2518 - DNA, 23 bp, Artificial Sequence
  Description of Artificial Sequence: Synthetic oligonucleotide
aggggaaggcatgttcctcttgg

SEQ ID NO: 2519 - DNA, 23 bp, Artificial Sequence
  Description of Artificial Sequence: Synthetic oligonucleotide
cctgagcagtccttgccaagagg

SEQ ID NO: 2520 - DNA, 23 bp, Artificial Sequence
  Description of Artificial Sequence: Synthetic oligonucleotide
aaggcatgttcctcttggcaagg

SEQ ID NO: 2521 - DNA, 23 bp, Artificial Sequence
  Description of Artificial Sequence: Synthetic oligonucleotide
cctcttggcaaggactgctcagg

SEQ ID NO: 2522 - DNA, 23 bp, Artificial Sequence
  Description of Artificial Sequence: Synthetic oligonucleotide
cttggcaaggactgctcaggagg

SEQ ID NO: 2523 - DNA, 23 bp, Artificial Sequence
  Description of Artificial Sequence: Synthetic oligonucleotide
aaggactgctcaggaggaagtgg

SEQ ID NO: 2524 - DNA, 23 bp, Artificial Sequence
  Description of Artificial Sequence: Synthetic oligonucleotide
gactgctcaggaggaagtggagg

SEQ ID NO: 2525 - DNA, 23 bp, Artificial Sequence
  Description of Artificial Sequence: Synthetic oligonucleotide
gctcaggaggaagtggaggcagg

SEQ ID NO: 2526 - DNA, 23 bp, Artificial Sequence
  Description of Artificial Sequence: Synthetic oligonucleotide
tggaggcaggctgccctgtcagg

SEQ ID NO: 2527 - DNA, 23 bp, Artificial Sequence
  Description of Artificial Sequence: Synthetic oligonucleotide
ggaggcaggctgccctgtcaggg

SEQ ID NO: 2528 - DNA, 23 bp, Artificial Sequence
  Description of Artificial Sequence: Synthetic oligonucleotide
tcaaggcaaaaaccctgacaggg

SEQ ID NO: 2529 - DNA, 23 bp, Artificial Sequence
  Description of Artificial Sequence: Synthetic oligonucleotide
atcaaggcaaaaaccctgacagg

SEQ ID NO: 2530 - DNA, 23 bp, Artificial Sequence
  Description of Artificial Sequence: Synthetic oligonucleotide
aggaagttctccttgaatcaagg

SEQ ID NO: 2531 - DNA, 23 bp, Artificial Sequence
  Description of Artificial Sequence: Synthetic oligonucleotide
agggtttttgccttgattcaagg

SEQ ID NO: 2532 - DNA, 23 bp, Artificial Sequence
  Description of Artificial Sequence: Synthetic oligonucleotide
cacttgtatcctttgtggttagg

SEQ ID NO: 2533 - DNA, 23 bp, Artificial Sequence
  Description of Artificial Sequence: Synthetic oligonucleotide
ggagaacttcctaaccacaaagg

SEQ ID NO: 2534 - DNA, 23 bp, Artificial Sequence
  Description of Artificial Sequence: Synthetic oligonucleotide
actcccacttgtatcctttgtgg

SEQ ID NO: 2535 - DNA, 23 bp, Artificial Sequence
  Description of Artificial Sequence: Synthetic oligonucleotide
ctaaccacaaaggatacaagtgg

SEQ ID NO: 2536 - DNA, 23 bp, Artificial Sequence
  Description of Artificial Sequence: Synthetic oligonucleotide
taaccacaaaggatacaagtggg

SEQ ID NO: 2537 - DNA, 23 bp, Artificial Sequence
  Description of Artificial Sequence: Synthetic oligonucleotide
aaaggatacaagtgggagtgagg

SEQ ID NO: 2538 - DNA, 23 bp, Artificial Sequence
  Description of Artificial Sequence: Synthetic oligonucleotide
ggatacaagtgggagtgaggcgg

SEQ ID NO: 2539 - DNA, 23 bp, Artificial Sequence
  Description of Artificial Sequence: Synthetic oligonucleotide
gtgttggagatctctagggaggg

SEQ ID NO: 2540 - DNA, 23 bp, Artificial Sequence
  Description of Artificial Sequence: Synthetic oligonucleotide
tgtgttggagatctctagggagg

SEQ ID NO: 2541 - DNA, 23 bp, Artificial Sequence
  Description of Artificial Sequence: Synthetic oligonucleotide
ctctgtgttggagatctctaggg

SEQ ID NO: 2542 - DNA, 23 bp, Artificial Sequence
  Description of Artificial Sequence: Synthetic oligonucleotide
tctctgtgttggagatctctagg

SEQ ID NO: 2543 - DNA, 23 bp, Artificial Sequence
  Description of Artificial Sequence: Synthetic oligonucleotide
gcgtgtttgtctctctgtgttgg

SEQ ID NO: 2544 - DNA, 23 bp, Artificial Sequence
  Description of Artificial Sequence: Synthetic oligonucleotide
acacagagagacaaacacgctgg

SEQ ID NO: 2545 - DNA, 23 bp, Artificial Sequence
  Description of Artificial Sequence: Synthetic oligonucleotide
cacagagagacaaacacgctggg

SEQ ID NO: 2546 - DNA, 23 bp, Artificial Sequence
  Description of Artificial Sequence: Synthetic oligonucleotide
acagagagacaaacacgctgggg

SEQ ID NO: 2547 - DNA, 23 bp, Artificial Sequence
  Description of Artificial Sequence: Synthetic oligonucleotide
agagacaaacacgctggggctgg

SEQ ID NO: 2548 - DNA, 23 bp, Artificial Sequence
  Description of Artificial Sequence: Synthetic oligonucleotide
acaaacacgctggggctggctgg

SEQ ID NO: 2549 - DNA, 23 bp, Artificial Sequence
  Description of Artificial Sequence: Synthetic oligonucleotide
tggggctggctggcactgacagg

SEQ ID NO: 2550 - DNA, 23 bp, Artificial Sequence
  Description of Artificial Sequence: Synthetic oligonucleotide
ctggcactgacaggcctcgcagg

SEQ ID NO: 2551 - DNA, 23 bp, Artificial Sequence
  Description of Artificial Sequence: Synthetic oligonucleotide
aacagccatccacacctgcgagg

SEQ ID NO: 2552 - DNA, 23 bp, Artificial Sequence
  Description of Artificial Sequence: Synthetic oligonucleotide
actgacaggcctcgcaggtgtgg

SEQ ID NO: 2553 - DNA, 23 bp, Artificial Sequence
  Description of Artificial Sequence: Synthetic oligonucleotide
acaggcctcgcaggtgtggatgg

SEQ ID NO: 2554 - DNA, 23 bp, Artificial Sequence
  Description of Artificial Sequence: Synthetic oligonucleotide
aggtgtggatggctgttagctgg

SEQ ID NO: 2555 - DNA, 23 bp, Artificial Sequence
  Description of Artificial Sequence: Synthetic oligonucleotide
ggtgtggatggctgttagctggg

SEQ ID NO: 2556 - DNA, 23 bp, Artificial Sequence
  Description of Artificial Sequence: Synthetic oligonucleotide
ccagaagaaaagcatgggagagg

SEQ ID NO: 2557 - DNA, 23 bp, Artificial Sequence
  Description of Artificial Sequence: Synthetic oligonucleotide
gcaacccagaagaaaagcatggg

SEQ ID NO: 2558 - DNA, 23 bp, Artificial Sequence
  Description of Artificial Sequence: Synthetic oligonucleotide
agcaacccagaagaaaagcatgg

SEQ ID NO: 2559 - DNA, 23 bp, Artificial Sequence
  Description of Artificial Sequence: Synthetic oligonucleotide
cctctcccatgcttttcttctgg

SEQ ID NO: 2560 - DNA, 23 bp, Artificial Sequence
  Description of Artificial Sequence: Synthetic oligonucleotide
ctctcccatgcttttcttctggg

SEQ ID NO: 2561 - DNA, 23 bp, Artificial Sequence
  Description of Artificial Sequence: Synthetic oligonucleotide
ttttcttctgggttgctcgaagg

SEQ ID NO: 2562 - DNA, 23 bp, Artificial Sequence
  Description of Artificial Sequence: Synthetic oligonucleotide
cttctgggttgctcgaaggacgg

SEQ ID NO: 2563 - DNA, 23 bp, Artificial Sequence
  Description of Artificial Sequence: Synthetic oligonucleotide
ttctgggttgctcgaaggacggg

SEQ ID NO: 2564 - DNA, 23 bp, Artificial Sequence
  Description of Artificial Sequence: Synthetic oligonucleotide
tctgggttgctcgaaggacgggg

SEQ ID NO: 2565 - DNA, 23 bp, Artificial Sequence
  Description of Artificial Sequence: Synthetic oligonucleotide
ctgggttgctcgaaggacggggg

SEQ ID NO: 2566 - DNA, 23 bp, Artificial Sequence
  Description of Artificial Sequence: Synthetic oligonucleotide
tcacgtgctgccaactatgtggg

SEQ ID NO: 2567 - DNA, 23 bp, Artificial Sequence
  Description of Artificial Sequence: Synthetic oligonucleotide
aaatgatgttcccacatagttgg

SEQ ID NO: 2568 - DNA, 23 bp, Artificial Sequence
  Description of Artificial Sequence: Synthetic oligonucleotide
ttcacgtgctgccaactatgtgg

SEQ ID NO: 2569 - DNA, 23 bp, Artificial Sequence
  Description of Artificial Sequence: Synthetic oligonucleotide
gtaagaggaggtgatgcaaaggg

SEQ ID NO: 2570 - DNA, 23 bp, Artificial Sequence
  Description of Artificial Sequence: Synthetic oligonucleotide
agtaagaggaggtgatgcaaagg

SEQ ID NO: 2571 - DNA, 23 bp, Artificial Sequence
  Description of Artificial Sequence: Synthetic oligonucleotide
caaatctaaacagtaagaggagg

SEQ ID NO: 2572 - DNA, 23 bp, Artificial Sequence
  Description of Artificial Sequence: Synthetic oligonucleotide
taccaaatctaaacagtaagagg

SEQ ID NO: 2573 - DNA, 23 bp, Artificial Sequence
  Description of Artificial Sequence: Synthetic oligonucleotide
ctcctcttactgtttagatttgg

SEQ ID NO: 2574 - DNA, 23 bp, Artificial Sequence
  Description of Artificial Sequence: Synthetic oligonucleotide
atggagggtcagaagagggaagg

SEQ ID NO: 2575 - DNA, 23 bp, Artificial Sequence
  Description of Artificial Sequence: Synthetic oligonucleotide
caaaatggagggtcagaagaggg

SEQ ID NO: 2576 - DNA, 23 bp, Artificial Sequence
  Description of Artificial Sequence: Synthetic oligonucleotide
gcaaaatggagggtcagaagagg

SEQ ID NO: 2577 - DNA, 23 bp, Artificial Sequence
  Description of Artificial Sequence: Synthetic oligonucleotide
ggaaagatcggcaaaatggaggg

SEQ ID NO: 2578 - DNA, 23 bp, Artificial Sequence
  Description of Artificial Sequence: Synthetic oligonucleotide
aggaaagatcggcaaaatggagg

SEQ ID NO: 2579 - DNA, 23 bp, Artificial Sequence
  Description of Artificial Sequence: Synthetic oligonucleotide
agaaggaaagatcggcaaaatgg

SEQ ID NO: 2580 - DNA, 23 bp, Artificial Sequence
  Description of Artificial Sequence: Synthetic oligonucleotide
gtgttataagaaggaaagatcgg

SEQ ID NO: 2581 - DNA, 23 bp, Artificial Sequence
  Description of Artificial Sequence: Synthetic oligonucleotide
agtaagtatgtgttataagaagg

SEQ ID NO: 2582 - DNA, 23 bp, Artificial Sequence
  Description of Artificial Sequence: Synthetic oligonucleotide
tcttataacacatacttactagg

SEQ ID NO: 2583 - DNA, 23 bp, Artificial Sequence
  Description of Artificial Sequence: Synthetic oligonucleotide
aggcccacccgggaagtagcagg

SEQ ID NO: 2584 - DNA, 23 bp, Artificial Sequence
  Description of Artificial Sequence: Synthetic oligonucleotide
actaggtacctgctacttcccgg

SEQ ID NO: 2585 - DNA, 23 bp, Artificial Sequence
  Description of Artificial Sequence: Synthetic oligonucleotide
ctaggtacctgctacttcccggg

SEQ ID NO: 2586 - DNA, 23 bp, Artificial Sequence
  Description of Artificial Sequence: Synthetic oligonucleotide
ggtacctgctacttcccgggtgg

SEQ ID NO: 2587 - DNA, 23 bp, Artificial Sequence
  Description of Artificial Sequence: Synthetic oligonucleotide
gtacctgctacttcccgggtggg

SEQ ID NO: 2588 - DNA, 23 bp, Artificial Sequence
  Description of Artificial Sequence: Synthetic oligonucleotide
cctggcacataggcccacccggg

SEQ ID NO: 2589 - DNA, 23 bp, Artificial Sequence
  Description of Artificial Sequence: Synthetic oligonucleotide
tcctggcacataggcccacccgg

SEQ ID NO: 2590 - DNA, 23 bp, Artificial Sequence
  Description of Artificial Sequence: Synthetic oligonucleotide
cctctatactcctggcacatagg

SEQ ID NO: 2591 - DNA, 23 bp, Artificial Sequence
  Description of Artificial Sequence: Synthetic oligonucleotide
cccgggtgggcctatgtgccagg

SEQ ID NO: 2592 - DNA, 23 bp, Artificial Sequence
  Description of Artificial Sequence: Synthetic oligonucleotide
cttgttcacctctatactcctgg

SEQ ID NO: 2593 - DNA, 23 bp, Artificial Sequence
  Description of Artificial Sequence: Synthetic oligonucleotide
cctatgtgccaggagtatagagg

SEQ ID NO: 2594 - DNA, 23 bp, Artificial Sequence
  Description of Artificial Sequence: Synthetic oligonucleotide
caggagtatagaggtgaacaagg

SEQ ID NO: 2595 - DNA, 23 bp, Artificial Sequence
  Description of Artificial Sequence: Synthetic oligonucleotide
agtatagaggtgaacaaggaagg

SEQ ID NO: 2596 - DNA, 23 bp, Artificial Sequence
  Description of Artificial Sequence: Synthetic oligonucleotide
agtagagctaatactctatctgg

SEQ ID NO: 2597 - DNA, 23 bp, Artificial Sequence
  Description of Artificial Sequence: Synthetic oligonucleotide
agacaacaaacaaatcaacaagg

SEQ ID NO: 2598 - DNA, 23 bp, Artificial Sequence
  Description of Artificial Sequence: Synthetic oligonucleotide
aacaaatcaacaaggtagccagg

SEQ ID NO: 2599 - DNA, 23 bp, Artificial Sequence
  Description of Artificial Sequence: Synthetic oligonucleotide
acaaatcaacaaggtagccaggg

SEQ ID NO: 2600 - DNA, 23 bp, Artificial Sequence
  Description of Artificial Sequence: Synthetic oligonucleotide
caaatcaacaaggtagccagggg

SEQ ID NO: 2601 - DNA, 23 bp, Artificial Sequence
  Description of Artificial Sequence: Synthetic oligonucleotide
acataaattatcacagcccctgg

SEQ ID NO: 2602 - DNA, 23 bp, Artificial Sequence
  Description of Artificial Sequence: Synthetic oligonucleotide
ctgtgataatttatgtcaagtgg

SEQ ID NO: 2603 - DNA, 23 bp, Artificial Sequence
  Description of Artificial Sequence: Synthetic oligonucleotide
tgtgataatttatgtcaagtggg

SEQ ID NO: 2604 - DNA, 23 bp, Artificial Sequence
  Description of Artificial Sequence: Synthetic oligonucleotide
ataatttatgtcaagtgggcagg

SEQ ID NO: 2605 - DNA, 23 bp, Artificial Sequence
  Description of Artificial Sequence: Synthetic oligonucleotide
tgtcaagtgggcaggtaaatcgg

SEQ ID NO: 2606 - DNA, 23 bp, Artificial Sequence
  Description of Artificial Sequence: Synthetic oligonucleotide
gtcaagtgggcaggtaaatcggg

SEQ ID NO: 2607 - DNA, 23 bp, Artificial Sequence
  Description of Artificial Sequence: Synthetic oligonucleotide
atcgggagtgacagtagtgcagg

SEQ ID NO: 2608 - DNA, 23 bp, Artificial Sequence
  Description of Artificial Sequence: Synthetic oligonucleotide
tcgggagtgacagtagtgcaggg

SEQ ID NO: 2609 - DNA, 23 bp, Artificial Sequence
  Description of Artificial Sequence: Synthetic oligonucleotide
ggagtgacagtagtgcagggagg

SEQ ID NO: 2610 - DNA, 23 bp, Artificial Sequence
  Description of Artificial Sequence: Synthetic oligonucleotide
gacagtagtgcagggaggattgg

SEQ ID NO: 2611 - DNA, 23 bp, Artificial Sequence
  Description of Artificial Sequence: Synthetic oligonucleotide
gcagggaggattggaaagtcagg

SEQ ID NO: 2612 - DNA, 23 bp, Artificial Sequence
  Description of Artificial Sequence: Synthetic oligonucleotide
cagggaggattggaaagtcaggg

SEQ ID NO: 2613 - DNA, 23 bp, Artificial Sequence
  Description of Artificial Sequence: Synthetic oligonucleotide
gaaagtcagggagttctctctgg

SEQ ID NO: 2614 - DNA, 23 bp, Artificial Sequence
  Description of Artificial Sequence: Synthetic oligonucleotide
agtcagggagttctctctggagg

SEQ ID NO: 2615 - DNA, 23 bp, Artificial Sequence
  Description of Artificial Sequence: Synthetic oligonucleotide
cagggagttctctctggaggagg

SEQ ID NO: 2616 - DNA, 23 bp, Artificial Sequence
  Description of Artificial Sequence: Synthetic oligonucleotide
ggagttctctctggaggaggtgg

SEQ ID NO: 2617 - DNA, 23 bp, Artificial Sequence
  Description of Artificial Sequence: Synthetic oligonucleotide
gcttttgatctgcagcctaaagg

SEQ ID NO: 2618 - DNA, 23 bp, Artificial Sequence
  Description of Artificial Sequence: Synthetic oligonucleotide
tggacccattctcatcctttagg

SEQ ID NO: 2619 - DNA, 23 bp, Artificial Sequence
  Description of Artificial Sequence: Synthetic oligonucleotide
tgcagcctaaaggatgagaatgg

SEQ ID NO: 2620 - DNA, 23 bp, Artificial Sequence
  Description of Artificial Sequence: Synthetic oligonucleotide
gcagcctaaaggatgagaatggg

SEQ ID NO: 2621 - DNA, 23 bp, Artificial Sequence
  Description of Artificial Sequence: Synthetic oligonucleotide
tgccccagcattttgtataatgg

SEQ ID NO: 2622 - DNA, 23 bp, Artificial Sequence
  Description of Artificial Sequence: Synthetic oligonucleotide
gggtccattatacaaaatgctgg

SEQ ID NO: 2623 - DNA, 23 bp, Artificial Sequence
  Description of Artificial Sequence: Synthetic oligonucleotide
ggtccattatacaaaatgctggg

SEQ ID NO: 2624 - DNA, 23 bp, Artificial Sequence
  Description of Artificial Sequence: Synthetic oligonucleotide
gtccattatacaaaatgctgggg

SEQ ID NO: 2625 - DNA, 23 bp, Artificial Sequence
  Description of Artificial Sequence: Synthetic oligonucleotide
ggcaagagcacacccagtagagg

SEQ ID NO: 2626 - DNA, 23 bp, Artificial Sequence
  Description of Artificial Sequence: Synthetic oligonucleotide
gcaagagcacacccagtagaggg

SEQ ID NO: 2627 - DNA, 23 bp, Artificial Sequence
  Description of Artificial Sequence: Synthetic oligonucleotide
ctattactctcccctctactggg

SEQ ID NO: 2628 - DNA, 23 bp, Artificial Sequence
  Description of Artificial Sequence: Synthetic oligonucleotide
caagagcacacccagtagagggg

SEQ ID NO: 2629 - DNA, 23 bp, Artificial Sequence
  Description of Artificial Sequence: Synthetic oligonucleotide
gctattactctcccctctactgg

SEQ ID NO: 2630 - DNA, 23 bp, Artificial Sequence
  Description of Artificial Sequence: Synthetic oligonucleotide
agaggggagagtaatagcaaagg

SEQ ID NO: 2631 - DNA, 23 bp, Artificial Sequence
  Description of Artificial Sequence: Synthetic oligonucleotide
gagagtaatagcaaaggctcagg

SEQ ID NO: 2632 - DNA, 23 bp, Artificial Sequence
  Description of Artificial Sequence: Synthetic oligonucleotide
agagtaatagcaaaggctcaggg

SEQ ID NO: 2633 - DNA, 23 bp, Artificial Sequence
  Description of Artificial Sequence: Synthetic oligonucleotide
taatagcaaaggctcagggcagg

SEQ ID NO: 2634 - DNA, 23 bp, Artificial Sequence
  Description of Artificial Sequence: Synthetic oligonucleotide
agcaaaggctcagggcaggaagg

SEQ ID NO: 2635 - DNA, 23 bp, Artificial Sequence
  Description of Artificial Sequence: Synthetic oligonucleotide
gcaaaggctcagggcaggaaggg

SEQ ID NO: 2636 - DNA, 23 bp, Artificial Sequence
  Description of Artificial Sequence: Synthetic oligonucleotide
ggctcagggcaggaagggcaagg

SEQ ID NO: 2637 - DNA, 23 bp, Artificial Sequence
  Description of Artificial Sequence: Synthetic oligonucleotide
gctcagggcaggaagggcaaggg

SEQ ID NO: 2638 - DNA, 23 bp, Artificial Sequence
  Description of Artificial Sequence: Synthetic oligonucleotide
gggcaggaagggcaagggagagg

SEQ ID NO: 2639 - DNA, 23 bp, Artificial Sequence
  Description of Artificial Sequence: Synthetic oligonucleotide
aagggcaagggagaggccagtgg

SEQ ID NO: 2640 - DNA, 23 bp, Artificial Sequence
  Description of Artificial Sequence: Synthetic oligonucleotide
agggcaagggagaggccagtggg

SEQ ID NO: 2641 - DNA, 23 bp, Artificial Sequence
  Description of Artificial Sequence: Synthetic oligonucleotide
tcacatgtgacctcacccactgg

SEQ ID NO: 2642 - DNA, 23 bp, Artificial Sequence
  Description of Artificial Sequence: Synthetic oligonucleotide
aagggagaggccagtgggtgagg

SEQ ID NO: 2643 - DNA, 23 bp, Artificial Sequence
  Description of Artificial Sequence: Synthetic oligonucleotide
gtgggtgaggtcacatgtgaagg

SEQ ID NO: 2644 - DNA, 23 bp, Artificial Sequence
  Description of Artificial Sequence: Synthetic oligonucleotide
tgggtgaggtcacatgtgaaggg

SEQ ID NO: 2645 - DNA, 23 bp, Artificial Sequence
  Description of Artificial Sequence: Synthetic oligonucleotide
cacatgtgaagggcatacaatgg

SEQ ID NO: 2646 - DNA, 23 bp, Artificial Sequence
  Description of Artificial Sequence: Synthetic oligonucleotide
acatgtgaagggcatacaatggg

SEQ ID NO: 2647 - DNA, 23 bp, Artificial Sequence
  Description of Artificial Sequence: Synthetic oligonucleotide
gcatacaatgggcaaagacaagg

SEQ ID NO: 2648 - DNA, 23 bp, Artificial Sequence
  Description of Artificial Sequence: Synthetic oligonucleotide
gggcaaagacaaggccagagtgg

SEQ ID NO: 2649 - DNA, 23 bp, Artificial Sequence
  Description of Artificial Sequence: Synthetic oligonucleotide
aggattgggcctggccactctgg

SEQ ID NO: 2650 - DNA, 23 bp, Artificial Sequence
  Description of Artificial Sequence: Synthetic oligonucleotide
aagacaaggccagagtggccagg

SEQ ID NO: 2651 - DNA, 23 bp, Artificial Sequence
  Description of Artificial Sequence: Synthetic oligonucleotide
aagtcctggaggattgggcctgg

SEQ ID NO: 2652 - DNA, 23 bp, Artificial Sequence
  Description of Artificial Sequence: Synthetic oligonucleotide
tctgcaagtcctggaggattggg

SEQ ID NO: 2653 - DNA, 23 bp, Artificial Sequence
  Description of Artificial Sequence: Synthetic oligonucleotide
gtctgcaagtcctggaggattgg

SEQ ID NO: 2654 - DNA, 23 bp, Artificial Sequence
  Description of Artificial Sequence: Synthetic oligonucleotide
gtggccaggcccaatcctccagg

SEQ ID NO: 2655 - DNA, 23 bp, Artificial Sequence
  Description of Artificial Sequence: Synthetic oligonucleotide
cccaggtctgcaagtcctggagg

SEQ ID NO: 2656 - DNA, 23 bp, Artificial Sequence
  Description of Artificial Sequence: Synthetic oligonucleotide
tttcccaggtctgcaagtcctgg

SEQ ID NO: 2657 - DNA, 23 bp, Artificial Sequence
  Description of Artificial Sequence: Synthetic oligonucleotide
tcctccaggacttgcagacctgg

SEQ ID NO: 2658 - DNA, 23 bp, Artificial Sequence
  Description of Artificial Sequence: Synthetic oligonucleotide
cctccaggacttgcagacctggg

SEQ ID NO: 2659 - DNA, 23 bp, Artificial Sequence
  Description of Artificial Sequence: Synthetic oligonucleotide
atggagatgcactctttcccagg

SEQ ID NO: 2660 - DNA, 23 bp, Artificial Sequence
  Description of Artificial Sequence: Synthetic oligonucleotide
gaaagagtgcatctccatcctgg

SEQ ID NO: 2661 - DNA, 23 bp, Artificial Sequence
  Description of Artificial Sequence: Synthetic oligonucleotide
aaagagtgcatctccatcctggg

SEQ ID NO: 2662 - DNA, 23 bp, Artificial Sequence
  Description of Artificial Sequence: Synthetic oligonucleotide
gtttcctgctgctcccaggatgg

SEQ ID NO: 2663 - DNA, 23 bp, Artificial Sequence
  Description of Artificial Sequence: Synthetic oligonucleotide
agtggtttcctgctgctcccagg

SEQ ID NO: 2664 - DNA, 23 bp, Artificial Sequence
  Description of Artificial Sequence: Synthetic oligonucleotide
atctccatcctgggagcagcagg

SEQ ID NO: 2665 - DNA, 23 bp, Artificial Sequence
  Description of Artificial Sequence: Synthetic oligonucleotide
ggagcagcaggaaaccactcagg

SEQ ID NO: 2666 - DNA, 23 bp, Artificial Sequence
  Description of Artificial Sequence: Synthetic oligonucleotide
ggatcttctaaaggcctgagtgg

SEQ ID NO: 2667 - DNA, 23 bp, Artificial Sequence
  Description of Artificial Sequence: Synthetic oligonucleotide
ctgccagaaggatcttctaaagg

SEQ ID NO: 2668 - DNA, 23 bp, Artificial Sequence
  Description of Artificial Sequence: Synthetic oligonucleotide
aggcctttagaagatccttctgg

SEQ ID NO: 2669 - DNA, 23 bp, Artificial Sequence
  Description of Artificial Sequence: Synthetic oligonucleotide
ttctctacacagctgccagaagg

SEQ ID NO: 2670 - DNA, 23 bp, Artificial Sequence
  Description of Artificial Sequence: Synthetic oligonucleotide
tctggcagctgtgtagagaatgg

SEQ ID NO: 2671 - DNA, 23 bp, Artificial Sequence
  Description of Artificial Sequence: Synthetic oligonucleotide
ctggcagctgtgtagagaatggg

SEQ ID NO: 2672 - DNA, 23 bp, Artificial Sequence
  Description of Artificial Sequence: Synthetic oligonucleotide
gcagctgtgtagagaatgggtgg

SEQ ID NO: 2673 - DNA, 23 bp, Artificial Sequence
  Description of Artificial Sequence: Synthetic oligonucleotide
tacatgagcccatgcatggaagg

SEQ ID NO: 2674 - DNA, 23 bp, Artificial Sequence
  Description of Artificial Sequence: Synthetic oligonucleotide
tggtgtgatccttccatgcatgg

SEQ ID NO: 2675 - DNA, 23 bp, Artificial Sequence
  Description of Artificial Sequence: Synthetic oligonucleotide
ggtgtgatccttccatgcatggg

SEQ ID NO: 2676 - DNA, 23 bp, Artificial Sequence
  Description of Artificial Sequence: Synthetic oligonucleotide
cacgtacatgagcccatgcatgg

SEQ ID NO: 2677 - DNA, 23 bp, Artificial Sequence
  Description of Artificial Sequence: Synthetic oligonucleotide
cactgtcactcgacagttactgg

SEQ ID NO: 2678 - DNA, 23 bp, Artificial Sequence
  Description of Artificial Sequence: Synthetic oligonucleotide
aactgtcgagtgacagtgtgagg

SEQ ID NO: 2679 - DNA, 23 bp, Artificial Sequence
  Description of Artificial Sequence: Synthetic oligonucleotide
tgtcgagtgacagtgtgaggagg

SEQ ID NO: 2680 - DNA, 23 bp, Artificial Sequence
  Description of Artificial Sequence: Synthetic oligonucleotide
gtcgagtgacagtgtgaggaggg

SEQ ID NO: 2681 - DNA, 23 bp, Artificial Sequence
  Description of Artificial Sequence: Synthetic oligonucleotide
gtctgctgtgcctacactcatgg

SEQ ID NO: 2682 - DNA, 23 bp, Artificial Sequence
  Description of Artificial Sequence: Synthetic oligonucleotide
gggctgcaagccatgagtgtagg

SEQ ID NO: 2683 - DNA, 23 bp, Artificial Sequence
  Description of Artificial Sequence: Synthetic oligonucleotide
cagacagactcacctttgtctgg

SEQ ID NO: 2684 - DNA, 23 bp, Artificial Sequence
  Description of Artificial Sequence: Synthetic oligonucleotide
cccatctcaccgccagacaaagg

SEQ ID NO: 2685 - DNA, 23 bp, Artificial Sequence
  Description of Artificial Sequence: Synthetic oligonucleotide
acagactcacctttgtctggcgg

SEQ ID NO: 2686 - DNA, 23 bp, Artificial Sequence
  Description of Artificial Sequence: Synthetic oligonucleotide
acctttgtctggcggtgagatgg

SEQ ID NO: 2687 - DNA, 23 bp, Artificial Sequence
  Description of Artificial Sequence: Synthetic oligonucleotide
cctttgtctggcggtgagatggg

SEQ ID NO: 2688 - DNA, 23 bp, Artificial Sequence
  Description of Artificial Sequence: Synthetic oligonucleotide
ctttgtctggcggtgagatgggg

SEQ ID NO: 2689 - DNA, 23 bp, Artificial Sequence
  Description of Artificial Sequence: Synthetic oligonucleotide
tgtctggcggtgagatggggtgg

SEQ ID NO: 2690 - DNA, 23 bp, Artificial Sequence
  Description of Artificial Sequence: Synthetic oligonucleotide
gtctggcggtgagatggggtggg

SEQ ID NO: 2691 - DNA, 23 bp, Artificial Sequence
  Description of Artificial Sequence: Synthetic oligonucleotide
atttctttgggaggtcaacttgg

SEQ ID NO: 2692 - DNA, 23 bp, Artificial Sequence
  Description of Artificial Sequence: Synthetic oligonucleotide
taaaatatcatttctttgggagg

SEQ ID NO: 2693 - DNA, 23 bp, Artificial Sequence
  Description of Artificial Sequence: Synthetic oligonucleotide
cactaaaatatcatttctttggg

SEQ ID NO: 2694 - DNA, 23 bp, Artificial Sequence
  Description of Artificial Sequence: Synthetic oligonucleotide
ccactaaaatatcatttctttgg

SEQ ID NO: 2695 - DNA, 23 bp, Artificial Sequence
  Description of Artificial Sequence: Synthetic oligonucleotide
ccaaagaaatgatattttagtgg

SEQ ID NO: 2696 - DNA, 23 bp, Artificial Sequence
  Description of Artificial Sequence: Synthetic oligonucleotide
aatcagagaagcaaagtaagagg

SEQ ID NO: 2697 - DNA, 23 bp, Artificial Sequence
  Description of Artificial Sequence: Synthetic oligonucleotide
atcagagaagcaaagtaagaggg

SEQ ID NO: 2698 - DNA, 23 bp, Artificial Sequence
  Description of Artificial Sequence: Synthetic oligonucleotide
agtaagagggaagagcagagagg

SEQ ID NO: 2699 - DNA, 23 bp, Artificial Sequence
  Description of Artificial Sequence: Synthetic oligonucleotide
ggaagagcagagaggacagcagg

SEQ ID NO: 2700 - DNA, 23 bp, Artificial Sequence
  Description of Artificial Sequence: Synthetic oligonucleotide
gaagagcagagaggacagcaggg

SEQ ID NO: 2701 - DNA, 23 bp, Artificial Sequence
  Description of Artificial Sequence: Synthetic oligonucleotide
cagagaggacagcagggacaagg

SEQ ID NO: 2702 - DNA, 23 bp, Artificial Sequence
  Description of Artificial Sequence: Synthetic oligonucleotide
ggacagcagggacaaggacttgg

SEQ ID NO: 2703 - DNA, 23 bp, Artificial Sequence
  Description of Artificial Sequence: Synthetic oligonucleotide
gacagcagggacaaggacttggg

SEQ ID NO: 2704 - DNA, 23 bp, Artificial Sequence
  Description of Artificial Sequence: Synthetic oligonucleotide
acagcagggacaaggacttgggg

SEQ ID NO: 2705 - DNA, 23 bp, Artificial Sequence
  Description of Artificial Sequence: Synthetic oligonucleotide
cagcagggacaaggacttggggg

SEQ ID NO: 2706 - DNA, 23 bp, Artificial Sequence
  Description of Artificial Sequence: Synthetic oligonucleotide
agggacaaggacttgggggcagg

SEQ ID NO: 2707 - DNA, 23 bp, Artificial Sequence
  Description of Artificial Sequence: Synthetic oligonucleotide
aaggacttgggggcaggaagagg

SEQ ID NO: 2708 - DNA, 23 bp, Artificial Sequence
  Description of Artificial Sequence: Synthetic oligonucleotide
cttgggggcaggaagaggaaagg

SEQ ID NO: 2709 - DNA, 23 bp, Artificial Sequence
  Description of Artificial Sequence: Synthetic oligonucleotide
ggggcaggaagaggaaaggcagg

SEQ ID NO: 2710 - DNA, 23 bp, Artificial Sequence
  Description of Artificial Sequence: Synthetic oligonucleotide
ggaagaggaaaggcaggttaagg

SEQ ID NO: 2711 - DNA, 23 bp, Artificial Sequence
  Description of Artificial Sequence: Synthetic oligonucleotide
caggttaaggacatgaaagatgg

SEQ ID NO: 2712 - DNA, 23 bp, Artificial Sequence
  Description of Artificial Sequence: Synthetic oligonucleotide
taaggacatgaaagatggccagg

SEQ ID NO: 2713 - DNA, 23 bp, Artificial Sequence
  Description of Artificial Sequence: Synthetic oligonucleotide
gacatgaaagatggccaggctgg

SEQ ID NO: 2714 - DNA, 23 bp, Artificial Sequence
  Description of Artificial Sequence: Synthetic oligonucleotide
ggcctgagctccagccagcctgg

SEQ ID NO: 2715 - DNA, 23 bp, Artificial Sequence
  Description of Artificial Sequence: Synthetic oligonucleotide
tgaaagatggccaggctggctgg

SEQ ID NO: 2716 - DNA, 23 bp, Artificial Sequence
  Description of Artificial Sequence: Synthetic oligonucleotide
ggccaggctggctggagctcagg

SEQ ID NO: 2717 - DNA, 23 bp, Artificial Sequence
  Description of Artificial Sequence: Synthetic oligonucleotide
gctggagctcaggcccagcaagg

SEQ ID NO: 2718 - DNA, 23 bp, Artificial Sequence
  Description of Artificial Sequence: Synthetic oligonucleotide
ggcccccagggggccttgctggg

SEQ ID NO: 2719 - DNA, 23 bp, Artificial Sequence
  Description of Artificial Sequence: Synthetic oligonucleotide
tggcccccagggggccttgctgg

SEQ ID NO: 2720 - DNA, 23 bp, Artificial Sequence
  Description of Artificial Sequence: Synthetic oligonucleotide
tcaggcccagcaaggccccctgg

SEQ ID NO: 2721 - DNA, 23 bp, Artificial Sequence
  Description of Artificial Sequence: Synthetic oligonucleotide
caggcccagcaaggccccctggg

SEQ ID NO: 2722 - DNA, 23 bp, Artificial Sequence
  Description of Artificial Sequence: Synthetic oligonucleotide
aggcccagcaaggccccctgggg

SEQ ID NO: 2723 - DNA, 23 bp, Artificial Sequence
  Description of Artificial Sequence: Synthetic oligonucleotide
ggcccagcaaggccccctggggg

SEQ ID NO: 2724 - DNA, 23 bp, Artificial Sequence
  Description of Artificial Sequence: Synthetic oligonucleotide
ccatgaccatggcccccaggggg

SEQ ID NO: 2725 - DNA, 23 bp, Artificial Sequence
  Description of Artificial Sequence: Synthetic oligonucleotide
cccatgaccatggcccccagggg

SEQ ID NO: 2726 - DNA, 23 bp, Artificial Sequence
  Description of Artificial Sequence: Synthetic oligonucleotide
acccatgaccatggcccccaggg

SEQ ID NO: 2727 - DNA, 23 bp, Artificial Sequence
  Description of Artificial Sequence: Synthetic oligonucleotide
cacccatgaccatggcccccagg

SEQ ID NO: 2728 - DNA, 23 bp, Artificial Sequence
  Description of Artificial Sequence: Synthetic oligonucleotide
gcaaggccccctgggggccatgg

SEQ ID NO: 2729 - DNA, 23 bp, Artificial Sequence
  Description of Artificial Sequence: Synthetic oligonucleotide
ccccctgggggccatggtcatgg

SEQ ID NO: 2730 - DNA, 23 bp, Artificial Sequence
  Description of Artificial Sequence: Synthetic oligonucleotide
cccaagctcacccatgaccatgg

SEQ ID NO: 2731 - DNA, 23 bp, Artificial Sequence
  Description of Artificial Sequence: Synthetic oligonucleotide
cccctgggggccatggtcatggg

SEQ ID NO: 2732 - DNA, 23 bp, Artificial Sequence
  Description of Artificial Sequence: Synthetic oligonucleotide
gccatggtcatgggtgagcttgg

SEQ ID NO: 2733 - DNA, 23 bp, Artificial Sequence
  Description of Artificial Sequence: Synthetic oligonucleotide
ccatggtcatgggtgagcttggg

SEQ ID NO: 2734 - DNA, 23 bp, Artificial Sequence
  Description of Artificial Sequence: Synthetic oligonucleotide
gtcatgggtgagcttgggtttgg

SEQ ID NO: 2735 - DNA, 23 bp, Artificial Sequence
  Description of Artificial Sequence: Synthetic oligonucleotide
tttggcttctgttttcgtcttgg

SEQ ID NO: 2736 - DNA, 23 bp, Artificial Sequence
  Description of Artificial Sequence: Synthetic oligonucleotide
ttggcttctgttttcgtcttggg

SEQ ID NO: 2737 - DNA, 23 bp, Artificial Sequence
  Description of Artificial Sequence: Synthetic oligonucleotide
tggttccccgcaagggctcgagg

SEQ ID NO: 2738 - DNA, 23 bp, Artificial Sequence
  Description of Artificial Sequence: Synthetic oligonucleotide
gtgaaagcctcgagcccttgcgg

SEQ ID NO: 2739 - DNA, 23 bp, Artificial Sequence
  Description of Artificial Sequence: Synthetic oligonucleotide
tgaaagcctcgagcccttgcggg

SEQ ID NO: 2740 - DNA, 23 bp, Artificial Sequence
  Description of Artificial Sequence: Synthetic oligonucleotide
gaaagcctcgagcccttgcgggg

SEQ ID NO: 2741 - DNA, 23 bp, Artificial Sequence
  Description of Artificial Sequence: Synthetic oligonucleotide
gcttcactggttccccgcaaggg

SEQ ID NO: 2742 - DNA, 23 bp, Artificial Sequence
  Description of Artificial Sequence: Synthetic oligonucleotide
agcttcactggttccccgcaagg

SEQ ID NO: 2743 - DNA, 23 bp, Artificial Sequence
  Description of Artificial Sequence: Synthetic oligonucleotide
agatgcacacacagcttcactgg

SEQ ID NO: 2744 - DNA, 23 bp, Artificial Sequence
  Description of Artificial Sequence: Synthetic oligonucleotide
agctgtgtgtgcatcttctgtgg

SEQ ID NO: 2745 - DNA, 23 bp, Artificial Sequence
  Description of Artificial Sequence: Synthetic oligonucleotide
gctgtgtgtgcatcttctgtggg

SEQ ID NO: 2746 - DNA, 23 bp, Artificial Sequence
  Description of Artificial Sequence: Synthetic oligonucleotide
ctgtgtgtgcatcttctgtgggg

SEQ ID NO: 2747 - DNA, 23 bp, Artificial Sequence
  Description of Artificial Sequence: Synthetic oligonucleotide
ggagtgctccctgaagactctgg

SEQ ID NO: 2748 - DNA, 23 bp, Artificial Sequence
  Description of Artificial Sequence: Synthetic oligonucleotide
tggggagtgccagagtcttcagg

SEQ ID NO: 2749 - DNA, 23 bp, Artificial Sequence
  Description of Artificial Sequence: Synthetic oligonucleotide
ggggagtgccagagtcttcaggg

SEQ ID NO: 2750 - DNA, 23 bp, Artificial Sequence
  Description of Artificial Sequence: Synthetic oligonucleotide
gaggcagcagcaggagccaaagg

SEQ ID NO: 2751 - DNA, 23 bp, Artificial Sequence
  Description of Artificial Sequence: Synthetic oligonucleotide
tgcacaaatgaggcagcagcagg

SEQ ID NO: 2752 - DNA, 23 bp, Artificial Sequence
  Description of Artificial Sequence: Synthetic oligonucleotide
tcaatctagctgcacaaatgagg

SEQ ID NO: 2753 - DNA, 23 bp, Artificial Sequence
  Description of Artificial Sequence: Synthetic oligonucleotide
cttggaccagagcaggtcttggg

SEQ ID NO: 2754 - DNA, 23 bp, Artificial Sequence
  Description of Artificial Sequence: Synthetic oligonucleotide
tcttggaccagagcaggtcttgg

SEQ ID NO: 2755 - DNA, 23 bp, Artificial Sequence
  Description of Artificial Sequence: Synthetic oligonucleotide
attgagcccaagacctgctctgg

SEQ ID NO: 2756 - DNA, 23 bp, Artificial Sequence
  Description of Artificial Sequence: Synthetic oligonucleotide
tgttcatcttggaccagagcagg

SEQ ID NO: 2757 - DNA, 23 bp, Artificial Sequence
  Description of Artificial Sequence: Synthetic oligonucleotide
ggcaggtggtatgttcatcttgg

SEQ ID NO: 2758 - DNA, 23 bp, Artificial Sequence
  Description of Artificial Sequence: Synthetic oligonucleotide
gagggtcacctcatggcaggtgg

SEQ ID NO: 2759 - DNA, 23 bp, Artificial Sequence
  Description of Artificial Sequence: Synthetic oligonucleotide
tgaacataccacctgccatgagg

SEQ ID NO: 2760 - DNA, 23 bp, Artificial Sequence
  Description of Artificial Sequence: Synthetic oligonucleotide
cctgagggtcacctcatggcagg

SEQ ID NO: 2761 - DNA, 23 bp, Artificial Sequence
  Description of Artificial Sequence: Synthetic oligonucleotide
atatcctgagggtcacctcatgg

SEQ ID NO: 2762 - DNA, 23 bp, Artificial Sequence
  Description of Artificial Sequence: Synthetic oligonucleotide
cctgccatgaggtgaccctcagg

SEQ ID NO: 2763 - DNA, 23 bp, Artificial Sequence
  Description of Artificial Sequence: Synthetic oligonucleotide
ggctgcagtggatatcctgaggg

SEQ ID NO: 2764 - DNA, 23 bp, Artificial Sequence
  Description of Artificial Sequence: Synthetic oligonucleotide
tggctgcagtggatatcctgagg

SEQ ID NO: 2765 - DNA, 23 bp, Artificial Sequence
  Description of Artificial Sequence: Synthetic oligonucleotide
accccagcccatggctgcagtgg

SEQ ID NO: 2766 - DNA, 23 bp, Artificial Sequence
  Description of Artificial Sequence: Synthetic oligonucleotide
caggatatccactgcagccatgg

SEQ ID NO: 2767 - DNA, 23 bp, Artificial Sequence
  Description of Artificial Sequence: Synthetic oligonucleotide
aggatatccactgcagccatggg

SEQ ID NO: 2768 - DNA, 23 bp, Artificial Sequence
  Description of Artificial Sequence: Synthetic oligonucleotide
tatccactgcagccatgggctgg

SEQ ID NO: 2769 - DNA, 23 bp, Artificial Sequence
  Description of Artificial Sequence: Synthetic oligonucleotide
atccactgcagccatgggctggg

SEQ ID NO: 2770 - DNA, 23 bp, Artificial Sequence
  Description of Artificial Sequence: Synthetic oligonucleotide
gacaggatgaccccagcccatgg

SEQ ID NO: 2771 - DNA, 23 bp, Artificial Sequence
  Description of Artificial Sequence: Synthetic oligonucleotide
tccactgcagccatgggctgggg

SEQ ID NO: 2772 - DNA, 23 bp, Artificial Sequence
  Description of Artificial Sequence: Synthetic oligonucleotide
gttagctgaagcaacaggacagg

SEQ ID NO: 2773 - DNA, 23 bp, Artificial Sequence
  Description of Artificial Sequence: Synthetic oligonucleotide
acacggttagctgaagcaacagg

SEQ ID NO: 2774 - DNA, 23 bp, Artificial Sequence
  Description of Artificial Sequence: Synthetic oligonucleotide
tagtgtggctgctagagacacgg

SEQ ID NO: 2775 - DNA, 23 bp, Artificial Sequence
  Description of Artificial Sequence: Synthetic oligonucleotide
agtcagccctcagagtagtgtgg

SEQ ID NO: 2776 - DNA, 23 bp, Artificial Sequence
  Description of Artificial Sequence: Synthetic oligonucleotide
ctagcagccacactactctgagg

SEQ ID NO: 2777 - DNA, 23 bp, Artificial Sequence
  Description of Artificial Sequence: Synthetic oligonucleotide
tagcagccacactactctgaggg

SEQ ID NO: 2778 - DNA, 23 bp, Artificial Sequence
  Description of Artificial Sequence: Synthetic oligonucleotide
ctctcccagacaaaagctgctgg

SEQ ID NO: 2779 - DNA, 23 bp, Artificial Sequence
  Description of Artificial Sequence: Synthetic oligonucleotide
agaatccagcagcttttgtctgg

SEQ ID NO: 2780 - DNA, 23 bp, Artificial Sequence
  Description of Artificial Sequence: Synthetic oligonucleotide
gaatccagcagcttttgtctggg

SEQ ID NO: 2781 - DNA, 23 bp, Artificial Sequence
  Description of Artificial Sequence: Synthetic oligonucleotide
cagcttttgtctgggagagctgg

SEQ ID NO: 2782 - DNA, 23 bp, Artificial Sequence
  Description of Artificial Sequence: Synthetic oligonucleotide
gggagagctggactgaagagagg

SEQ ID NO: 2783 - DNA, 23 bp, Artificial Sequence
  Description of Artificial Sequence: Synthetic oligonucleotide
ggactgaagagaggcatagctgg

SEQ ID NO: 2784 - DNA, 23 bp, Artificial Sequence
  Description of Artificial Sequence: Synthetic oligonucleotide
catagctggagacccatagctgg

SEQ ID NO: 2785 - DNA, 23 bp, Artificial Sequence
  Description of Artificial Sequence: Synthetic oligonucleotide
ttctggccagggccagctatggg

SEQ ID NO: 2786 - DNA, 23 bp, Artificial Sequence
  Description of Artificial Sequence: Synthetic oligonucleotide
tttctggccagggccagctatgg

SEQ ID NO: 2787 - DNA, 23 bp, Artificial Sequence
  Description of Artificial Sequence: Synthetic oligonucleotide
tggagacccatagctggccctgg

SEQ ID NO: 2788 - DNA, 23 bp, Artificial Sequence
  Description of Artificial Sequence: Synthetic oligonucleotide
actctccctgtttctggccaggg

SEQ ID NO: 2789 - DNA, 23 bp, Artificial Sequence
  Description of Artificial Sequence: Synthetic oligonucleotide
cactctccctgtttctggccagg

SEQ ID NO: 2790 - DNA, 23 bp, Artificial Sequence
  Description of Artificial Sequence: Synthetic oligonucleotide
agctggccctggccagaaacagg

SEQ ID NO: 2791 - DNA, 23 bp, Artificial Sequence
  Description of Artificial Sequence: Synthetic oligonucleotide
gctggccctggccagaaacaggg

SEQ ID NO: 2792 - DNA, 23 bp, Artificial Sequence
  Description of Artificial Sequence: Synthetic oligonucleotide
cctttcactctccctgtttctgg

SEQ ID NO: 2793 - DNA, 23 bp, Artificial Sequence
  Description of Artificial Sequence: Synthetic oligonucleotide
ccagaaacagggagagtgaaagg

SEQ ID NO: 2794 - DNA, 23 bp, Artificial Sequence
  Description of Artificial Sequence: Synthetic oligonucleotide
aaacagggagagtgaaaggctgg

SEQ ID NO: 2795 - DNA, 23 bp, Artificial Sequence
  Description of Artificial Sequence: Synthetic oligonucleotide
gtgaaaggctggaatagccaagg

SEQ ID NO: 2796 - DNA, 23 bp, Artificial Sequence
  Description of Artificial Sequence: Synthetic oligonucleotide
tattagccttgctctggccttgg

SEQ ID NO: 2797 - DNA, 23 bp, Artificial Sequence
  Description of Artificial Sequence: Synthetic oligonucleotide
gaatagccaaggccagagcaagg

SEQ ID NO: 2798 - DNA, 23 bp, Artificial Sequence
  Description of Artificial Sequence: Synthetic oligonucleotide
tctacctattagccttgctctgg

SEQ ID NO: 2799 - DNA, 23 bp, Artificial Sequence
  Description of Artificial Sequence: Synthetic oligonucleotide
aaggccagagcaaggctaatagg

SEQ ID NO: 2800 - DNA, 23 bp, Artificial Sequence
  Description of Artificial Sequence: Synthetic oligonucleotide
taggtagagcaacagcttacagg

SEQ ID NO: 2801 - DNA, 23 bp, Artificial Sequence
  Description of Artificial Sequence: Synthetic oligonucleotide
agagcaacagcttacaggtgtgg

SEQ ID NO: 2802 - DNA, 23 bp, Artificial Sequence
  Description of Artificial Sequence: Synthetic oligonucleotide
gagcaacagcttacaggtgtggg

SEQ ID NO: 2803 - DNA, 23 bp, Artificial Sequence
  Description of Artificial Sequence: Synthetic oligonucleotide
agcaacagcttacaggtgtgggg

SEQ ID NO: 2804 - DNA, 23 bp, Artificial Sequence
  Description of Artificial Sequence: Synthetic oligonucleotide
gcaacagcttacaggtgtggggg

SEQ ID NO: 2805 - DNA, 23 bp, Artificial Sequence
  Description of Artificial Sequence: Synthetic oligonucleotide
acagcttacaggtgtgggggtgg

SEQ ID NO: 2806 - DNA, 23 bp, Artificial Sequence
  Description of Artificial Sequence: Synthetic oligonucleotide
ggtgtgggggtggcagatactgg

SEQ ID NO: 2807 - DNA, 23 bp, Artificial Sequence
  Description of Artificial Sequence: Synthetic oligonucleotide
agatactggcacccttgaaatgg

SEQ ID NO: 2808 - DNA, 23 bp, Artificial Sequence
  Description of Artificial Sequence: Synthetic oligonucleotide
gcatgaggaatccatttcaaggg

SEQ ID NO: 2809 - DNA, 23 bp, Artificial Sequence
  Description of Artificial Sequence: Synthetic oligonucleotide
ggcatgaggaatccatttcaagg

SEQ ID NO: 2810 - DNA, 23 bp, Artificial Sequence
  Description of Artificial Sequence: Synthetic oligonucleotide
aatagtgaagcgtgggcatgagg

SEQ ID NO: 2811 - DNA, 23 bp, Artificial Sequence
  Description of Artificial Sequence: Synthetic oligonucleotide
agagaagaatagtgaagcgtggg

SEQ ID NO: 2812 - DNA, 23 bp, Artificial Sequence
  Description of Artificial Sequence: Synthetic oligonucleotide
cagagaagaatagtgaagcgtgg

SEQ ID NO: 2813 - DNA, 23 bp, Artificial Sequence
  Description of Artificial Sequence: Synthetic oligonucleotide
cgcttcactattcttctctgtgg

SEQ ID NO: 2814 - DNA, 23 bp, Artificial Sequence
  Description of Artificial Sequence: Synthetic oligonucleotide
cactattcttctctgtggctagg

SEQ ID NO: 2815 - DNA, 23 bp, Artificial Sequence
  Description of Artificial Sequence: Synthetic oligonucleotide
actattcttctctgtggctaggg

SEQ ID NO: 2816 - DNA, 23 bp, Artificial Sequence
  Description of Artificial Sequence: Synthetic oligonucleotide
ctattcttctctgtggctagggg

SEQ ID NO: 2817 - DNA, 23 bp, Artificial Sequence
  Description of Artificial Sequence: Synthetic oligonucleotide
ctctgtggctaggggatttatgg

SEQ ID NO: 2818 - DNA, 23 bp, Artificial Sequence
  Description of Artificial Sequence: Synthetic oligonucleotide
ctggtttttaactgtaattttgg

SEQ ID NO: 2819 - DNA, 23 bp, Artificial Sequence
  Description of Artificial Sequence: Synthetic oligonucleotide
tacagttaaaaaccagccatagg

SEQ ID NO: 2820 - DNA, 23 bp, Artificial Sequence
  Description of Artificial Sequence: Synthetic oligonucleotide
cactgtgcctggcctatggctgg

SEQ ID NO: 2821 - DNA, 23 bp, Artificial Sequence
  Description of Artificial Sequence: Synthetic oligonucleotide
ttaaaaaccagccataggccagg

SEQ ID NO: 2822 - DNA, 23 bp, Artificial Sequence
  Description of Artificial Sequence: Synthetic oligonucleotide
gagtcactgtgcctggcctatgg

SEQ ID NO: 2823 - DNA, 23 bp, Artificial Sequence
  Description of Artificial Sequence: Synthetic oligonucleotide
aaggcgtgagtcactgtgcctgg

SEQ ID NO: 2824 - DNA, 23 bp, Artificial Sequence
  Description of Artificial Sequence: Synthetic oligonucleotide
tcccaaagtgctgatattaaagg

SEQ ID NO: 2825 - DNA, 23 bp, Artificial Sequence
  Description of Artificial Sequence: Synthetic oligonucleotide
cgcctttaatatcagcactttgg

SEQ ID NO: 2826 - DNA, 23 bp, Artificial Sequence
  Description of Artificial Sequence: Synthetic oligonucleotide
gcctttaatatcagcactttggg

SEQ ID NO: 2827 - DNA, 23 bp, Artificial Sequence
  Description of Artificial Sequence: Synthetic oligonucleotide
tttaatatcagcactttgggagg

SEQ ID NO: 2828 - DNA, 23 bp, Artificial Sequence
  Description of Artificial Sequence: Synthetic oligonucleotide
atcagcactttgggaggacaagg

SEQ ID NO: 2829 - DNA, 23 bp, Artificial Sequence
  Description of Artificial Sequence: Synthetic oligonucleotide
agcactttgggaggacaaggtgg

SEQ ID NO: 2830 - DNA, 23 bp, Artificial Sequence
  Description of Artificial Sequence: Synthetic oligonucleotide
gcactttgggaggacaaggtggg

SEQ ID NO: 2831 - DNA, 23 bp, Artificial Sequence
  Description of Artificial Sequence: Synthetic oligonucleotide
ctttgggaggacaaggtgggcgg

SEQ ID NO: 2832 - DNA, 23 bp, Artificial Sequence
  Description of Artificial Sequence: Synthetic oligonucleotide
tgggcggatcacctgagatctgg

SEQ ID NO: 2833 - DNA, 23 bp, Artificial Sequence
  Description of Artificial Sequence: Synthetic oligonucleotide
ggtctcaaattccagatctcagg

SEQ ID NO: 2834 - DNA, 23 bp, Artificial Sequence
  Description of Artificial Sequence: Synthetic oligonucleotide
tctggaatttgagaccagcctgg

SEQ ID NO: 2835 - DNA, 23 bp, Artificial Sequence
  Description of Artificial Sequence: Synthetic oligonucleotide
tttcgccatgttggccaggctgg

SEQ ID NO: 2836 - DNA, 23 bp, Artificial Sequence
  Description of Artificial Sequence: Synthetic oligonucleotide
ggggtttcgccatgttggccagg

SEQ ID NO: 2837 - DNA, 23 bp, Artificial Sequence
  Description of Artificial Sequence: Synthetic oligonucleotide
tgagaccagcctggccaacatgg

SEQ ID NO: 2838 - DNA, 23 bp, Artificial Sequence
  Description of Artificial Sequence: Synthetic oligonucleotide
gagatggggtttcgccatgttgg

SEQ ID NO: 2839 - DNA, 23 bp, Artificial Sequence
  Description of Artificial Sequence: Synthetic oligonucleotide
ttgtatttttagtagagatgggg

SEQ ID NO: 2840 - DNA, 23 bp, Artificial Sequence
  Description of Artificial Sequence: Synthetic oligonucleotide
tttgtatttttagtagagatggg

SEQ ID NO: 2841 - DNA, 23 bp, Artificial Sequence
  Description of Artificial Sequence: Synthetic oligonucleotide
ttttgtatttttagtagagatgg

SEQ ID NO: 2842 - DNA, 23 bp, Artificial Sequence
  Description of Artificial Sequence: Synthetic oligonucleotide
ctaaaaatacaaaaattagctgg

SEQ ID NO: 2843 - DNA, 23 bp, Artificial Sequence
  Description of Artificial Sequence: Synthetic oligonucleotide
taaaaatacaaaaattagctggg

SEQ ID NO: 2844 - DNA, 23 bp, Artificial Sequence
  Description of Artificial Sequence: Synthetic oligonucleotide
atacaaaaattagctgggcatgg

SEQ ID NO: 2845 - DNA, 23 bp, Artificial Sequence
  Description of Artificial Sequence: Synthetic oligonucleotide
caaaaattagctgggcatggtgg

SEQ ID NO: 2846 - DNA, 23 bp, Artificial Sequence
  Description of Artificial Sequence: Synthetic oligonucleotide
aaattagctgggcatggtggtgg

SEQ ID NO: 2847 - DNA, 23 bp, Artificial Sequence
  Description of Artificial Sequence: Synthetic oligonucleotide
aattagctgggcatggtggtggg

SEQ ID NO: 2848 - DNA, 23 bp, Artificial Sequence
  Description of Artificial Sequence: Synthetic oligonucleotide
ccctgagtaactgggattacagg

SEQ ID NO: 2849 - DNA, 23 bp, Artificial Sequence
  Description of Artificial Sequence: Synthetic oligonucleotide
gcctcagcccctgagtaactggg

SEQ ID NO: 2850 - DNA, 23 bp, Artificial Sequence
  Description of Artificial Sequence: Synthetic oligonucleotide
tgcctcagcccctgagtaactgg

SEQ ID NO: 2851 - DNA, 23 bp, Artificial Sequence
  Description of Artificial Sequence: Synthetic oligonucleotide
acctgtaatcccagttactcagg

SEQ ID NO: 2852 - DNA, 23 bp, Artificial Sequence
  Description of Artificial Sequence: Synthetic oligonucleotide
cctgtaatcccagttactcaggg

SEQ ID NO: 2853 - DNA, 23 bp, Artificial Sequence
  Description of Artificial Sequence: Synthetic oligonucleotide
ctgtaatcccagttactcagggg

SEQ ID NO: 2854 - DNA, 23 bp, Artificial Sequence
  Description of Artificial Sequence: Synthetic oligonucleotide
tcccagttactcaggggctgagg

SEQ ID NO: 2855 - DNA, 23 bp, Artificial Sequence
  Description of Artificial Sequence: Synthetic oligonucleotide
agttactcaggggctgaggcagg

SEQ ID NO: 2856 - DNA, 23 bp, Artificial Sequence
  Description of Artificial Sequence: Synthetic oligonucleotide
ctccacctcctgggttcaagtgg

SEQ ID NO: 2857 - DNA, 23 bp, Artificial Sequence
  Description of Artificial Sequence: Synthetic oligonucleotide
caggagaaccacttgaacccagg

SEQ ID NO: 2858 - DNA, 23 bp, Artificial Sequence
  Description of Artificial Sequence: Synthetic oligonucleotide
gagaaccacttgaacccaggagg

SEQ ID NO: 2859 - DNA, 23 bp, Artificial Sequence
  Description of Artificial Sequence: Synthetic oligonucleotide
aaccacttgaacccaggaggtgg

SEQ ID NO: 2860 - DNA, 23 bp, Artificial Sequence
  Description of Artificial Sequence: Synthetic oligonucleotide
cactgcaacctccacctcctggg

SEQ ID NO: 2861 - DNA, 23 bp, Artificial Sequence
  Description of Artificial Sequence: Synthetic oligonucleotide
tcactgcaacctccacctcctgg

SEQ ID NO: 2862 - DNA, 23 bp, Artificial Sequence
  Description of Artificial Sequence: Synthetic oligonucleotide
cacttgaacccaggaggtggagg

SEQ ID NO: 2863 - DNA, 23 bp, Artificial Sequence
  Description of Artificial Sequence: Synthetic oligonucleotide
ggagtgcagtggtgcaagcttgg

SEQ ID NO: 2864 - DNA, 23 bp, Artificial Sequence
  Description of Artificial Sequence: Synthetic oligonucleotide
tcacccaggctggagtgcagtgg

SEQ ID NO: 2865 - DNA, 23 bp, Artificial Sequence
  Description of Artificial Sequence: Synthetic oligonucleotide
tgcaccactgcactccagcctgg

SEQ ID NO: 2866 - DNA, 23 bp, Artificial Sequence
  Description of Artificial Sequence: Synthetic oligonucleotide
gcaccactgcactccagcctggg

SEQ ID NO: 2867 - DNA, 23 bp, Artificial Sequence
  Description of Artificial Sequence: Synthetic oligonucleotide
tgtcgctgtgtcacccaggctgg

SEQ ID NO: 2868 - DNA, 23 bp, Artificial Sequence
  Description of Artificial Sequence: Synthetic oligonucleotide
ggagtgtcgctgtgtcacccagg

SEQ ID NO: 2869 - DNA, 23 bp, Artificial Sequence
  Description of Artificial Sequence: Synthetic oligonucleotide
tttttttttttttcttgagacgg

SEQ ID NO: 2870 - DNA, 23 bp, Artificial Sequence
  Description of Artificial Sequence: Synthetic oligonucleotide
gggcatgacgaaatctgaaatgg

SEQ ID NO: 2871 - DNA, 23 bp, Artificial Sequence
  Description of Artificial Sequence: Synthetic oligonucleotide
acttagcagctcattgaggaggg

SEQ ID NO: 2872 - DNA, 23 bp, Artificial Sequence
  Description of Artificial Sequence: Synthetic oligonucleotide
aacttagcagctcattgaggagg

SEQ ID NO: 2873 - DNA, 23 bp, Artificial Sequence
  Description of Artificial Sequence: Synthetic oligonucleotide
cctaacttagcagctcattgagg

SEQ ID NO: 2874 - DNA, 23 bp, Artificial Sequence
  Description of Artificial Sequence: Synthetic oligonucleotide
cctcaatgagctgctaagttagg

SEQ ID NO: 2875 - DNA, 23 bp, Artificial Sequence
  Description of Artificial Sequence: Synthetic oligonucleotide
agtgcattgattattgctgcagg

SEQ ID NO: 2876 - DNA, 23 bp, Artificial Sequence
  Description of Artificial Sequence: Synthetic oligonucleotide
attgattattgctgcaggagagg

SEQ ID NO: 2877 - DNA, 23 bp, Artificial Sequence
  Description of Artificial Sequence: Synthetic oligonucleotide
ttgattattgctgcaggagaggg

SEQ ID NO: 2878 - DNA, 23 bp, Artificial Sequence
  Description of Artificial Sequence: Synthetic oligonucleotide
ttattgctgcaggagagggaagg

SEQ ID NO: 2879 - DNA, 23 bp, Artificial Sequence
  Description of Artificial Sequence: Synthetic oligonucleotide
tgctgcaggagagggaaggaagg

SEQ ID NO: 2880 - DNA, 23 bp, Artificial Sequence
  Description of Artificial Sequence: Synthetic oligonucleotide
gttttcacatgttttccttttgg

SEQ ID NO: 2881 - DNA, 23 bp, Artificial Sequence
  Description of Artificial Sequence: Synthetic oligonucleotide
cctcctttctcatctccaaaagg

SEQ ID NO: 2882 - DNA, 23 bp, Artificial Sequence
  Description of Artificial Sequence: Synthetic oligonucleotide
tttccttttggagatgagaaagg

SEQ ID NO: 2883 - DNA, 23 bp, Artificial Sequence
  Description of Artificial Sequence: Synthetic oligonucleotide
ccttttggagatgagaaaggagg

SEQ ID NO: 2884 - DNA, 23 bp, Artificial Sequence
  Description of Artificial Sequence: Synthetic oligonucleotide
aaaggggcagggtagggggaagg

SEQ ID NO: 2885 - DNA, 23 bp, Artificial Sequence
  Description of Artificial Sequence: Synthetic oligonucleotide
gtagaaaggggcagggtaggggg

SEQ ID NO: 2886 - DNA, 23 bp, Artificial Sequence
  Description of Artificial Sequence: Synthetic oligonucleotide
agtagaaaggggcagggtagggg

SEQ ID NO: 2887 - DNA, 23 bp, Artificial Sequence
  Description of Artificial Sequence: Synthetic oligonucleotide
gagtagaaaggggcagggtaggg

SEQ ID NO: 2888 - DNA, 23 bp, Artificial Sequence
  Description of Artificial Sequence: Synthetic oligonucleotide
ggagtagaaaggggcagggtagg

SEQ ID NO: 2889 - DNA, 23 bp, Artificial Sequence
  Description of Artificial Sequence: Synthetic oligonucleotide
tcctggagtagaaaggggcaggg

SEQ ID NO: 2890 - DNA, 23 bp, Artificial Sequence
  Description of Artificial Sequence: Synthetic oligonucleotide
gtcctggagtagaaaggggcagg

SEQ ID NO: 2891 - DNA, 23 bp, Artificial Sequence
  Description of Artificial Sequence: Synthetic oligonucleotide
agaggtcctggagtagaaagggg

SEQ ID NO: 2892 - DNA, 23 bp, Artificial Sequence
  Description of Artificial Sequence: Synthetic oligonucleotide
cagaggtcctggagtagaaaggg

SEQ ID NO: 2893 - DNA, 23 bp, Artificial Sequence
  Description of Artificial Sequence: Synthetic oligonucleotide
tcagaggtcctggagtagaaagg

SEQ ID NO: 2894 - DNA, 23 bp, Artificial Sequence
  Description of Artificial Sequence: Synthetic oligonucleotide
accctgcccctttctactccagg

SEQ ID NO: 2895 - DNA, 23 bp, Artificial Sequence
  Description of Artificial Sequence: Synthetic oligonucleotide
tcatggcctttcagaggtcctgg

SEQ ID NO: 2896 - DNA, 23 bp, Artificial Sequence
  Description of Artificial Sequence: Synthetic oligonucleotide
tctactccaggacctctgaaagg

SEQ ID NO: 2897 - DNA, 23 bp, Artificial Sequence
  Description of Artificial Sequence: Synthetic oligonucleotide
ttgtgctcatggcctttcagagg

SEQ ID NO: 2898 - DNA, 23 bp, Artificial Sequence
  Description of Artificial Sequence: Synthetic oligonucleotide
aggcagcagctttgtgctcatgg

SEQ ID NO: 2899 - DNA, 23 bp, Artificial Sequence
  Description of Artificial Sequence: Synthetic oligonucleotide
ccctgcatttcaggggactcagg

SEQ ID NO: 2900 - DNA, 23 bp, Artificial Sequence
  Description of Artificial Sequence: Synthetic oligonucleotide
gggcgtaccctgcatttcagggg

SEQ ID NO: 2901 - DNA, 23 bp, Artificial Sequence
  Description of Artificial Sequence: Synthetic oligonucleotide
ggggcgtaccctgcatttcaggg

SEQ ID NO: 2902 - DNA, 23 bp, Artificial Sequence
  Description of Artificial Sequence: Synthetic oligonucleotide
tggggcgtaccctgcatttcagg

SEQ ID NO: 2903 - DNA, 23 bp, Artificial Sequence
  Description of Artificial Sequence: Synthetic oligonucleotide
gcctgagtcccctgaaatgcagg

SEQ ID NO: 2904 - DNA, 23 bp, Artificial Sequence
  Description of Artificial Sequence: Synthetic oligonucleotide
cctgagtcccctgaaatgcaggg

SEQ ID NO: 2905 - DNA, 23 bp, Artificial Sequence
  Description of Artificial Sequence: Synthetic oligonucleotide
tgaaatgcagggtacgccccagg

SEQ ID NO: 2906 - DNA, 23 bp, Artificial Sequence
  Description of Artificial Sequence: Synthetic oligonucleotide
tggggtacatcagagacctgggg

SEQ ID NO: 2907 - DNA, 23 bp, Artificial Sequence
  Description of Artificial Sequence: Synthetic oligonucleotide
gtggggtacatcagagacctggg

SEQ ID NO: 2908 - DNA, 23 bp, Artificial Sequence
  Description of Artificial Sequence: Synthetic oligonucleotide
ggtggggtacatcagagacctgg

SEQ ID NO: 2909 - DNA, 23 bp, Artificial Sequence
  Description of Artificial Sequence: Synthetic oligonucleotide
ttgagaggaaaagtgtggtgggg

SEQ ID NO: 2910 - DNA, 23 bp, Artificial Sequence
  Description of Artificial Sequence: Synthetic oligonucleotide
tttgagaggaaaagtgtggtggg

SEQ ID NO: 2911 - DNA, 23 bp, Artificial Sequence
  Description of Artificial Sequence: Synthetic oligonucleotide
gtttgagaggaaaagtgtggtgg

SEQ ID NO: 2912 - DNA, 23 bp, Artificial Sequence
  Description of Artificial Sequence: Synthetic oligonucleotide
tatgtttgagaggaaaagtgtgg

SEQ ID NO: 2913 - DNA, 23 bp, Artificial Sequence
  Description of Artificial Sequence: Synthetic oligonucleotide
gatcctggaatatgtttgagagg

SEQ ID NO: 2914 - DNA, 23 bp, Artificial Sequence
  Description of Artificial Sequence: Synthetic oligonucleotide
tttcctctcaaacatattccagg

SEQ ID NO: 2915 - DNA, 23 bp, Artificial Sequence
  Description of Artificial Sequence: Synthetic oligonucleotide
caaaagaaatcaagtgatcctgg

SEQ ID NO: 2916 - DNA, 23 bp, Artificial Sequence
  Description of Artificial Sequence: Synthetic oligonucleotide
atatagcacattgacacggtggg

SEQ ID NO: 2917 - DNA, 23 bp, Artificial Sequence
  Description of Artificial Sequence: Synthetic oligonucleotide
tatatagcacattgacacggtgg

SEQ ID NO: 2918 - DNA, 23 bp, Artificial Sequence
  Description of Artificial Sequence: Synthetic oligonucleotide
ttttatatagcacattgacacgg

SEQ ID NO: 2919 - DNA, 23 bp, Artificial Sequence
  Description of Artificial Sequence: Synthetic oligonucleotide
tttaaatgtatagatgtataggg

SEQ ID NO: 2920 - DNA, 23 bp, Artificial Sequence
  Description of Artificial Sequence: Synthetic oligonucleotide
ctttaaatgtatagatgtatagg

SEQ ID NO: 2921 - DNA, 23 bp, Artificial Sequence
  Description of Artificial Sequence: Synthetic oligonucleotide
cccatccctgcacagatagaagg

SEQ ID NO: 2922 - DNA, 23 bp, Artificial Sequence
  Description of Artificial Sequence: Synthetic oligonucleotide
tgttctccttctatctgtgcagg

SEQ ID NO: 2923 - DNA, 23 bp, Artificial Sequence
  Description of Artificial Sequence: Synthetic oligonucleotide
gttctccttctatctgtgcaggg

SEQ ID NO: 2924 - DNA, 23 bp, Artificial Sequence
  Description of Artificial Sequence: Synthetic oligonucleotide
tccttctatctgtgcagggatgg

SEQ ID NO: 2925 - DNA, 23 bp, Artificial Sequence
  Description of Artificial Sequence: Synthetic oligonucleotide
ccttctatctgtgcagggatggg

SEQ ID NO: 2926 - DNA, 23 bp, Artificial Sequence
  Description of Artificial Sequence: Synthetic oligonucleotide
tatctgtgcagggatgggaaagg

SEQ ID NO: 2927 - DNA, 23 bp, Artificial Sequence
  Description of Artificial Sequence: Synthetic oligonucleotide
atctgtgcagggatgggaaaggg

SEQ ID NO: 2928 - DNA, 23 bp, Artificial Sequence
  Description of Artificial Sequence: Synthetic oligonucleotide
catatttctgaaagcacagatgg

SEQ ID NO: 2929 - DNA, 23 bp, Artificial Sequence
  Description of Artificial Sequence: Synthetic oligonucleotide
atatttctgaaagcacagatggg

SEQ ID NO: 2930 - DNA, 23 bp, Artificial Sequence
  Description of Artificial Sequence: Synthetic oligonucleotide
tgaaagcacagatgggaagacgg

SEQ ID NO: 2931 - DNA, 23 bp, Artificial Sequence
  Description of Artificial Sequence: Synthetic oligonucleotide
gaaagcacagatgggaagacggg

SEQ ID NO: 2932 - DNA, 23 bp, Artificial Sequence
  Description of Artificial Sequence: Synthetic oligonucleotide
acgggatttgttccgtgtccagg

SEQ ID NO: 2933 - DNA, 23 bp, Artificial Sequence
  Description of Artificial Sequence: Synthetic oligonucleotide
gtaccataatcacctggacacgg

SEQ ID NO: 2934 - DNA, 23 bp, Artificial Sequence
  Description of Artificial Sequence: Synthetic oligonucleotide
atagaggtaccataatcacctgg

SEQ ID NO: 2935 - DNA, 23 bp, Artificial Sequence
  Description of Artificial Sequence: Synthetic oligonucleotide
gttccgtgtccaggtgattatgg

SEQ ID NO: 2936 - DNA, 23 bp, Artificial Sequence
  Description of Artificial Sequence: Synthetic oligonucleotide
agtgccggccaggcgcatagagg

SEQ ID NO: 2937 - DNA, 23 bp, Artificial Sequence
  Description of Artificial Sequence: Synthetic oligonucleotide
ttatggtacctctatgcgcctgg

SEQ ID NO: 2938 - DNA, 23 bp, Artificial Sequence
  Description of Artificial Sequence: Synthetic oligonucleotide
ggtacctctatgcgcctggccgg

SEQ ID NO: 2939 - DNA, 23 bp, Artificial Sequence
  Description of Artificial Sequence: Synthetic oligonucleotide
ctctgtccccagtgccggccagg

SEQ ID NO: 2940 - DNA, 23 bp, Artificial Sequence
  Description of Artificial Sequence: Synthetic oligonucleotide
tctatgcgcctggccggcactgg

SEQ ID NO: 2941 - DNA, 23 bp, Artificial Sequence
  Description of Artificial Sequence: Synthetic oligonucleotide
ctatgcgcctggccggcactggg

SEQ ID NO: 2942 - DNA, 23 bp, Artificial Sequence
  Description of Artificial Sequence: Synthetic oligonucleotide
tatgcgcctggccggcactgggg

SEQ ID NO: 2943 - DNA, 23 bp, Artificial Sequence
  Description of Artificial Sequence: Synthetic oligonucleotide
atggcctctgtccccagtgccgg

SEQ ID NO: 2944 - DNA, 23 bp, Artificial Sequence
  Description of Artificial Sequence: Synthetic oligonucleotide
ctggccggcactggggacagagg

SEQ ID NO: 2945 - DNA, 23 bp, Artificial Sequence
  Description of Artificial Sequence: Synthetic oligonucleotide
ctgtgctgtattcattttcatgg

SEQ ID NO: 2946 - DNA, 23 bp, Artificial Sequence
  Description of Artificial Sequence: Synthetic oligonucleotide
cttaagtttcttggaggcaaagg

SEQ ID NO: 2947 - DNA, 23 bp, Artificial Sequence
  Description of Artificial Sequence: Synthetic oligonucleotide
ctaggtcttaagtttcttggagg

SEQ ID NO: 2948 - DNA, 23 bp, Artificial Sequence
  Description of Artificial Sequence: Synthetic oligonucleotide
ctactaggtcttaagtttcttgg

SEQ ID NO: 2949 - DNA, 23 bp, Artificial Sequence
  Description of Artificial Sequence: Synthetic oligonucleotide
taaagcctgccatttctactagg

SEQ ID NO: 2950 - DNA, 23 bp, Artificial Sequence
  Description of Artificial Sequence: Synthetic oligonucleotide
aacttaagacctagtagaaatgg

SEQ ID NO: 2951 - DNA, 23 bp, Artificial Sequence
  Description of Artificial Sequence: Synthetic oligonucleotide
taagacctagtagaaatggcagg

SEQ ID NO: 2952 - DNA, 23 bp, Artificial Sequence
  Description of Artificial Sequence: Synthetic oligonucleotide
gaaatggcaggctttaaaacagg

SEQ ID NO: 2953 - DNA, 23 bp, Artificial Sequence
  Description of Artificial Sequence: Synthetic oligonucleotide
caggctttaaaacaggttgttgg

SEQ ID NO: 2954 - DNA, 23 bp, Artificial Sequence
  Description of Artificial Sequence: Synthetic oligonucleotide
aggctttaaaacaggttgttggg

SEQ ID NO: 2955 - DNA, 23 bp, Artificial Sequence
  Description of Artificial Sequence: Synthetic oligonucleotide
caggttgttgggatctgatttgg

SEQ ID NO: 2956 - DNA, 23 bp, Artificial Sequence
  Description of Artificial Sequence: Synthetic oligonucleotide
gagatactcacagcacaaaatgg

SEQ ID NO: 2957 - DNA, 23 bp, Artificial Sequence
  Description of Artificial Sequence: Synthetic oligonucleotide
agatactcacagcacaaaatggg

SEQ ID NO: 2958 - DNA, 23 bp, Artificial Sequence
  Description of Artificial Sequence: Synthetic oligonucleotide
gatactcacagcacaaaatgggg

SEQ ID NO: 2959 - DNA, 23 bp, Artificial Sequence
  Description of Artificial Sequence: Synthetic oligonucleotide
acagcacaaaatggggaatgagg

SEQ ID NO: 2960 - DNA, 23 bp, Artificial Sequence
  Description of Artificial Sequence: Synthetic oligonucleotide
cagcacaaaatggggaatgaggg

SEQ ID NO: 2961 - DNA, 23 bp, Artificial Sequence
  Description of Artificial Sequence: Synthetic oligonucleotide
cacaaaatggggaatgagggcgg

SEQ ID NO: 2962 - DNA, 23 bp, Artificial Sequence
  Description of Artificial Sequence: Synthetic oligonucleotide
acaaaatggggaatgagggcggg

SEQ ID NO: 2963 - DNA, 23 bp, Artificial Sequence
  Description of Artificial Sequence: Synthetic oligonucleotide
tggggaatgagggcgggcattgg

SEQ ID NO: 2964 - DNA, 23 bp, Artificial Sequence
  Description of Artificial Sequence: Synthetic oligonucleotide
ggggaatgagggcgggcattggg

SEQ ID NO: 2965 - DNA, 23 bp, Artificial Sequence
  Description of Artificial Sequence: Synthetic oligonucleotide
ttgggacacacatagccttaagg

SEQ ID NO: 2966 - DNA, 23 bp, Artificial Sequence
  Description of Artificial Sequence: Synthetic oligonucleotide
tgggacacacatagccttaaggg

SEQ ID NO: 2967 - DNA, 23 bp, Artificial Sequence
  Description of Artificial Sequence: Synthetic oligonucleotide
gggacacacatagccttaagggg

SEQ ID NO: 2968 - DNA, 23 bp, Artificial Sequence
  Description of Artificial Sequence: Synthetic oligonucleotide
aaaagcctttgggccccttaagg

SEQ ID NO: 2969 - DNA, 23 bp, Artificial Sequence
  Description of Artificial Sequence: Synthetic oligonucleotide
catagccttaaggggcccaaagg

SEQ ID NO: 2970 - DNA, 23 bp, Artificial Sequence
  Description of Artificial Sequence: Synthetic oligonucleotide
atacagttctaaaagcctttggg

SEQ ID NO: 2971 - DNA, 23 bp, Artificial Sequence
  Description of Artificial Sequence: Synthetic oligonucleotide
aatacagttctaaaagcctttgg

SEQ ID NO: 2972 - DNA, 23 bp, Artificial Sequence
  Description of Artificial Sequence: Synthetic oligonucleotide
gtgcaaatcatgttttaataggg

SEQ ID NO: 2973 - DNA, 23 bp, Artificial Sequence
  Description of Artificial Sequence: Synthetic oligonucleotide
tgtgcaaatcatgttttaatagg

SEQ ID NO: 2974 - DNA, 23 bp, Artificial Sequence
  Description of Artificial Sequence: Synthetic oligonucleotide
acagagcacattctttgctttgg

SEQ ID NO: 2975 - DNA, 23 bp, Artificial Sequence
  Description of Artificial Sequence: Synthetic oligonucleotide
gcctatagtaaggagttctgagg

SEQ ID NO: 2976 - DNA, 23 bp, Artificial Sequence
  Description of Artificial Sequence: Synthetic oligonucleotide
acctcagaactccttactatagg

SEQ ID NO: 2977 - DNA, 23 bp, Artificial Sequence
  Description of Artificial Sequence: Synthetic oligonucleotide
accatgcccggcctatagtaagg

SEQ ID NO: 2978 - DNA, 23 bp, Artificial Sequence
  Description of Artificial Sequence: Synthetic oligonucleotide
cagaactccttactataggccgg

SEQ ID NO: 2979 - DNA, 23 bp, Artificial Sequence
  Description of Artificial Sequence: Synthetic oligonucleotide
agaactccttactataggccggg

SEQ ID NO: 2980 - DNA, 23 bp, Artificial Sequence
  Description of Artificial Sequence: Synthetic oligonucleotide
tccttactataggccgggcatgg

SEQ ID NO: 2981 - DNA, 23 bp, Artificial Sequence
  Description of Artificial Sequence: Synthetic oligonucleotide
gctgggattataaccatgcccgg

SEQ ID NO: 2982 - DNA, 23 bp, Artificial Sequence
  Description of Artificial Sequence: Synthetic oligonucleotide
ccttggcttcccaaagtgctggg

SEQ ID NO: 2983 - DNA, 23 bp, Artificial Sequence
  Description of Artificial Sequence: Synthetic oligonucleotide
tggttataatcccagcactttgg

SEQ ID NO: 2984 - DNA, 23 bp, Artificial Sequence
  Description of Artificial Sequence: Synthetic oligonucleotide
gccttggcttcccaaagtgctgg

SEQ ID NO: 2985 - DNA, 23 bp, Artificial Sequence
  Description of Artificial Sequence: Synthetic oligonucleotide
ggttataatcccagcactttggg

SEQ ID NO: 2986 - DNA, 23 bp, Artificial Sequence
  Description of Artificial Sequence: Synthetic oligonucleotide
cccagcactttgggaagccaagg

SEQ ID NO: 2987 - DNA, 23 bp, Artificial Sequence
  Description of Artificial Sequence: Synthetic oligonucleotide
agcactttgggaagccaaggcgg

SEQ ID NO: 2988 - DNA, 23 bp, Artificial Sequence
  Description of Artificial Sequence: Synthetic oligonucleotide
gcactttgggaagccaaggcggg

SEQ ID NO: 2989 - DNA, 23 bp, Artificial Sequence
  Description of Artificial Sequence: Synthetic oligonucleotide
ctcaagtgatctgcccgccttgg

SEQ ID NO: 2990 - DNA, 23 bp, Artificial Sequence
  Description of Artificial Sequence: Synthetic oligonucleotide
caaggcgggcagatcacttgagg

SEQ ID NO: 2991 - DNA, 23 bp, Artificial Sequence
  Description of Artificial Sequence: Synthetic oligonucleotide
ctgagagttcaagaccagcctgg

SEQ ID NO: 2992 - DNA, 23 bp, Artificial Sequence
  Description of Artificial Sequence: Synthetic oligonucleotide
ttttaccatgttggccaggctgg

SEQ ID NO: 2993 - DNA, 23 bp, Artificial Sequence
  Description of Artificial Sequence: Synthetic oligonucleotide
ggggttttaccatgttggccagg

SEQ ID NO: 2994 - DNA, 23 bp, Artificial Sequence
  Description of Artificial Sequence: Synthetic oligonucleotide
caagaccagcctggccaacatgg

SEQ ID NO: 2995 - DNA, 23 bp, Artificial Sequence
  Description of Artificial Sequence: Synthetic oligonucleotide
gagacggggttttaccatgttgg

SEQ ID NO: 2996 - DNA, 23 bp, Artificial Sequence
  Description of Artificial Sequence: Synthetic oligonucleotide
ttgtatttttagtagagacgggg

SEQ ID NO: 2997 - DNA, 23 bp, Artificial Sequence
  Description of Artificial Sequence: Synthetic oligonucleotide
tttgtatttttagtagagacggg

SEQ ID NO: 2998 - DNA, 23 bp, Artificial Sequence
  Description of Artificial Sequence: Synthetic oligonucleotide
ttttgtatttttagtagagacgg

SEQ ID NO: 2999 - DNA, 23 bp, Artificial Sequence
  Description of Artificial Sequence: Synthetic oligonucleotide
ctaaaaatacaaaaattagctgg

SEQ ID NO: 3000 - DNA, 23 bp, Artificial Sequence
  Description of Artificial Sequence: Synthetic oligonucleotide
taaaaatacaaaaattagctggg

SEQ ID NO: 3001 - DNA, 23 bp, Artificial Sequence
  Description of Artificial Sequence: Synthetic oligonucleotide
atacaaaaattagctgggtgtgg

SEQ ID NO: 3002 - DNA, 23 bp, Artificial Sequence
  Description of Artificial Sequence: Synthetic oligonucleotide
caaaaattagctgggtgtggtgg

SEQ ID NO: 3003 - DNA, 23 bp, Artificial Sequence
  Description of Artificial Sequence: Synthetic oligonucleotide
aaattagctgggtgtggtggtgg

SEQ ID NO: 3004 - DNA, 23 bp, Artificial Sequence
  Description of Artificial Sequence: Synthetic oligonucleotide
tgagtagctgggattacaggtgg

SEQ ID NO: 3005 - DNA, 23 bp, Artificial Sequence
  Description of Artificial Sequence: Synthetic oligonucleotide
tcctgagtagctgggattacagg

SEQ ID NO: 3006 - DNA, 23 bp, Artificial Sequence
  Description of Artificial Sequence: Synthetic oligonucleotide
cctcagcctcctgagtagctggg

SEQ ID NO: 3007 - DNA, 23 bp, Artificial Sequence
  Description of Artificial Sequence: Synthetic oligonucleotide
acctcagcctcctgagtagctgg

SEQ ID NO: 3008 - DNA, 23 bp, Artificial Sequence
  Description of Artificial Sequence: Synthetic oligonucleotide
acctgtaatcccagctactcagg

SEQ ID NO: 3009 - DNA, 23 bp, Artificial Sequence
  Description of Artificial Sequence: Synthetic oligonucleotide
tgtaatcccagctactcaggagg

SEQ ID NO: 3010 - DNA, 23 bp, Artificial Sequence
  Description of Artificial Sequence: Synthetic oligonucleotide
cccagctactcaggaggctgagg

SEQ ID NO: 3011 - DNA, 23 bp, Artificial Sequence
  Description of Artificial Sequence: Synthetic oligonucleotide
gctactcaggaggctgaggtagg

SEQ ID NO: 3012 - DNA, 23 bp, Artificial Sequence
  Description of Artificial Sequence: Synthetic oligonucleotide
gtaggagaatcacttgaacctgg

SEQ ID NO: 3013 - DNA, 23 bp, Artificial Sequence
  Description of Artificial Sequence: Synthetic oligonucleotide
taggagaatcacttgaacctggg

SEQ ID NO: 3014 - DNA, 23 bp, Artificial Sequence
  Description of Artificial Sequence: Synthetic oligonucleotide
gagaatcacttgaacctgggagg

SEQ ID NO: 3015 - DNA, 23 bp, Artificial Sequence
  Description of Artificial Sequence: Synthetic oligonucleotide
tattgcaacttctgcctcccagg

SEQ ID NO: 3016 - DNA, 23 bp, Artificial Sequence
  Description of Artificial Sequence: Synthetic oligonucleotide
ggagtgcagtggcatgatctggg

SEQ ID NO: 3017 - DNA, 23 bp, Artificial Sequence
  Description of Artificial Sequence: Synthetic oligonucleotide
tggagtgcagtggcatgatctgg

SEQ ID NO: 3018 - DNA, 23 bp, Artificial Sequence
  Description of Artificial Sequence: Synthetic oligonucleotide
ttgcccaggctggagtgcagtgg

SEQ ID NO: 3019 - DNA, 23 bp, Artificial Sequence
  Description of Artificial Sequence: Synthetic oligonucleotide
catgccactgcactccagcctgg

SEQ ID NO: 3020 - DNA, 23 bp, Artificial Sequence
  Description of Artificial Sequence: Synthetic oligonucleotide
atgccactgcactccagcctggg

SEQ ID NO: 3021 - DNA, 23 bp, Artificial Sequence
  Description of Artificial Sequence: Synthetic oligonucleotide
tctagctttgttgcccaggctgg

SEQ ID NO: 3022 - DNA, 23 bp, Artificial Sequence
  Description of Artificial Sequence: Synthetic oligonucleotide
agagtctagctttgttgcccagg

SEQ ID NO: 3023 - DNA, 23 bp, Artificial Sequence
  Description of Artificial Sequence: Synthetic oligonucleotide
ttttcttacagtttataataagg

SEQ ID NO: 3024 - DNA, 23 bp, Artificial Sequence
  Description of Artificial Sequence: Synthetic oligonucleotide
tataaactgtaagaaaaaaaagg

SEQ ID NO: 3025 - DNA, 23 bp, Artificial Sequence
  Description of Artificial Sequence: Synthetic oligonucleotide
ttgcaaaagggacgaagtagggg

SEQ ID NO: 3026 - DNA, 23 bp, Artificial Sequence
  Description of Artificial Sequence: Synthetic oligonucleotide
tttgcaaaagggacgaagtaggg

SEQ ID NO: 3027 - DNA, 23 bp, Artificial Sequence
  Description of Artificial Sequence: Synthetic oligonucleotide
atttgcaaaagggacgaagtagg

SEQ ID NO: 3028 - DNA, 23 bp, Artificial Sequence
  Description of Artificial Sequence: Synthetic oligonucleotide
gaaaaggcagatttgcaaaaggg

SEQ ID NO: 3029 - DNA, 23 bp, Artificial Sequence
  Description of Artificial Sequence: Synthetic oligonucleotide
ggaaaaggcagatttgcaaaagg

SEQ ID NO: 3030 - DNA, 23 bp, Artificial Sequence
  Description of Artificial Sequence: Synthetic oligonucleotide
gctggttagtgagtaggaaaagg

SEQ ID NO: 3031 - DNA, 23 bp, Artificial Sequence
  Description of Artificial Sequence: Synthetic oligonucleotide
gaaccagctggttagtgagtagg

SEQ ID NO: 3032 - DNA, 23 bp, Artificial Sequence
  Description of Artificial Sequence: Synthetic oligonucleotide
tttcctactcactaaccagctgg

SEQ ID NO: 3033 - DNA, 23 bp, Artificial Sequence
  Description of Artificial Sequence: Synthetic oligonucleotide
tgtccttgctctgaaccagctgg

SEQ ID NO: 3034 - DNA, 23 bp, Artificial Sequence
  Description of Artificial Sequence: Synthetic oligonucleotide
taaccagctggttcagagcaagg

SEQ ID NO: 3035 - DNA, 23 bp, Artificial Sequence
  Description of Artificial Sequence: Synthetic oligonucleotide
cagagcaaggacactctgtttgg

SEQ ID NO: 3036 - DNA, 23 bp, Artificial Sequence
  Description of Artificial Sequence: Synthetic oligonucleotide
ttccttccagtctgcagcgatgg

SEQ ID NO: 3037 - DNA, 23 bp, Artificial Sequence
  Description of Artificial Sequence: Synthetic oligonucleotide
ttggtgccatcgctgcagactgg

SEQ ID NO: 3038 - DNA, 23 bp, Artificial Sequence
  Description of Artificial Sequence: Synthetic oligonucleotide
tgccatcgctgcagactggaagg

SEQ ID NO: 3039 - DNA, 23 bp, Artificial Sequence
  Description of Artificial Sequence: Synthetic oligonucleotide
cgctgcagactggaaggaagagg

SEQ ID NO: 3040 - DNA, 23 bp, Artificial Sequence
  Description of Artificial Sequence: Synthetic oligonucleotide
agactgttgggtgtggggcaagg

SEQ ID NO: 3041 - DNA, 23 bp, Artificial Sequence
  Description of Artificial Sequence: Synthetic oligonucleotide
gcaggagactgttgggtgtgggg

SEQ ID NO: 3042 - DNA, 23 bp, Artificial Sequence
  Description of Artificial Sequence: Synthetic oligonucleotide
agcaggagactgttgggtgtggg

SEQ ID NO: 3043 - DNA, 23 bp, Artificial Sequence
  Description of Artificial Sequence: Synthetic oligonucleotide
cagcaggagactgttgggtgtgg

SEQ ID NO: 3044 - DNA, 23 bp, Artificial Sequence
  Description of Artificial Sequence: Synthetic oligonucleotide
ggtaacagcaggagactgttggg

SEQ ID NO: 3045 - DNA, 23 bp, Artificial Sequence
  Description of Artificial Sequence: Synthetic oligonucleotide
cggtaacagcaggagactgttgg

SEQ ID NO: 3046 - DNA, 23 bp, Artificial Sequence
  Description of Artificial Sequence: Synthetic oligonucleotide
gccaacctgccggtaacagcagg

SEQ ID NO: 3047 - DNA, 23 bp, Artificial Sequence
  Description of Artificial Sequence: Synthetic oligonucleotide
caacagtctcctgctgttaccgg

SEQ ID NO: 3048 - DNA, 23 bp, Artificial Sequence
  Description of Artificial Sequence: Synthetic oligonucleotide
agtctcctgctgttaccggcagg

SEQ ID NO: 3049 - DNA, 23 bp, Artificial Sequence
  Description of Artificial Sequence: Synthetic oligonucleotide
tcctgctgttaccggcaggttgg

SEQ ID NO: 3050 - DNA, 23 bp, Artificial Sequence
  Description of Artificial Sequence: Synthetic oligonucleotide
ctgcctgcctgccaacctgccgg

SEQ ID NO: 3051 - DNA, 23 bp, Artificial Sequence
  Description of Artificial Sequence: Synthetic oligonucleotide
gctgttaccggcaggttggcagg

SEQ ID NO: 3052 - DNA, 23 bp, Artificial Sequence
  Description of Artificial Sequence: Synthetic oligonucleotide
ttaccggcaggttggcaggcagg

SEQ ID NO: 3053 - DNA, 23 bp, Artificial Sequence
  Description of Artificial Sequence: Synthetic oligonucleotide
cggcaggttggcaggcaggcagg

SEQ ID NO: 3054 - DNA, 23 bp, Artificial Sequence
  Description of Artificial Sequence: Synthetic oligonucleotide
caggcaggcgagaagcagccagg

SEQ ID NO: 3055 - DNA, 23 bp, Artificial Sequence
  Description of Artificial Sequence: Synthetic oligonucleotide
aggcaggcgagaagcagccaggg

SEQ ID NO: 3056 - DNA, 23 bp, Artificial Sequence
  Description of Artificial Sequence: Synthetic oligonucleotide
aggcgagaagcagccagggctgg

SEQ ID NO: 3057 - DNA, 23 bp, Artificial Sequence
  Description of Artificial Sequence: Synthetic oligonucleotide
actggacacaccaccagccctgg

SEQ ID NO: 3058 - DNA, 23 bp, Artificial Sequence
  Description of Artificial Sequence: Synthetic oligonucleotide
cgagaagcagccagggctggtgg

SEQ ID NO: 3059 - DNA, 23 bp, Artificial Sequence
  Description of Artificial Sequence: Synthetic oligonucleotide
ctggaaactagtcttcaaactgg

SEQ ID NO: 3060 - DNA, 23 bp, Artificial Sequence
  Description of Artificial Sequence: Synthetic oligonucleotide
tgaagactagtttccagccctgg

SEQ ID NO: 3061 - DNA, 23 bp, Artificial Sequence
  Description of Artificial Sequence: Synthetic oligonucleotide
agggtgagcagggccagggctgg

SEQ ID NO: 3062 - DNA, 23 bp, Artificial Sequence
  Description of Artificial Sequence: Synthetic oligonucleotide
ttggagggtgagcagggccaggg

SEQ ID NO: 3063 - DNA, 23 bp, Artificial Sequence
  Description of Artificial Sequence: Synthetic oligonucleotide
cttggagggtgagcagggccagg

SEQ ID NO: 3064 - DNA, 23 bp, Artificial Sequence
  Description of Artificial Sequence: Synthetic oligonucleotide
ggccacttggagggtgagcaggg

SEQ ID NO: 3065 - DNA, 23 bp, Artificial Sequence
  Description of Artificial Sequence: Synthetic oligonucleotide
gggccacttggagggtgagcagg

SEQ ID NO: 3066 - DNA, 23 bp, Artificial Sequence
  Description of Artificial Sequence: Synthetic oligonucleotide
ggccctgctcaccctccaagtgg

SEQ ID NO: 3067 - DNA, 23 bp, Artificial Sequence
  Description of Artificial Sequence: Synthetic oligonucleotide
acctgccagggccacttggaggg

SEQ ID NO: 3068 - DNA, 23 bp, Artificial Sequence
  Description of Artificial Sequence: Synthetic oligonucleotide
aacctgccagggccacttggagg

SEQ ID NO: 3069 - DNA, 23 bp, Artificial Sequence
  Description of Artificial Sequence: Synthetic oligonucleotide
aggaacctgccagggccacttgg

SEQ ID NO: 3070 - DNA, 23 bp, Artificial Sequence
  Description of Artificial Sequence: Synthetic oligonucleotide
gctcaccctccaagtggccctgg

SEQ ID NO: 3071 - DNA, 23 bp, Artificial Sequence
  Description of Artificial Sequence: Synthetic oligonucleotide
accctccaagtggccctggcagg

SEQ ID NO: 3072 - DNA, 23 bp, Artificial Sequence
  Description of Artificial Sequence: Synthetic oligonucleotide
tgtggtagaggaacctgccaggg

SEQ ID NO: 3073 - DNA, 23 bp, Artificial Sequence
  Description of Artificial Sequence: Synthetic oligonucleotide
atgtggtagaggaacctgccagg

SEQ ID NO: 3074 - DNA, 23 bp, Artificial Sequence
  Description of Artificial Sequence: Synthetic oligonucleotide
tgaagtccacgatgtggtagagg

SEQ ID NO: 3075 - DNA, 23 bp, Artificial Sequence
  Description of Artificial Sequence: Synthetic oligonucleotide
caggttcctctaccacatcgtgg

SEQ ID NO: 3076 - DNA, 23 bp, Artificial Sequence
  Description of Artificial Sequence: Synthetic oligonucleotide
ggaaggtgaagtccacgatgtgg

SEQ ID NO: 3077 - DNA, 23 bp, Artificial Sequence
  Description of Artificial Sequence: Synthetic oligonucleotide
ttgagcttcttagagaaggaagg

SEQ ID NO: 3078 - DNA, 23 bp, Artificial Sequence
  Description of Artificial Sequence: Synthetic oligonucleotide
gggattgagcttcttagagaagg

SEQ ID NO: 3079 - DNA, 23 bp, Artificial Sequence
  Description of Artificial Sequence: Synthetic oligonucleotide
tctaagaagctcaatccccaagg

SEQ ID NO: 3080 - DNA, 23 bp, Artificial Sequence
  Description of Artificial Sequence: Synthetic oligonucleotide
cctatgggaatgaggccttgggg

SEQ ID NO: 3081 - DNA, 23 bp, Artificial Sequence
  Description of Artificial Sequence: Synthetic oligonucleotide
gcctatgggaatgaggccttggg

SEQ ID NO: 3082 - DNA, 23 bp, Artificial Sequence
  Description of Artificial Sequence: Synthetic oligonucleotide
ggcctatgggaatgaggccttgg

SEQ ID NO: 3083 - DNA, 23 bp, Artificial Sequence
  Description of Artificial Sequence: Synthetic oligonucleotide
tgagaaggcctatgggaatgagg

SEQ ID NO: 3084 - DNA, 23 bp, Artificial Sequence
  Description of Artificial Sequence: Synthetic oligonucleotide
ccccaaggcctcattcccatagg

SEQ ID NO: 3085 - DNA, 23 bp, Artificial Sequence
  Description of Artificial Sequence: Synthetic oligonucleotide
aaaagggtgagaaggcctatggg

SEQ ID NO: 3086 - DNA, 23 bp, Artificial Sequence
  Description of Artificial Sequence: Synthetic oligonucleotide
aaaaagggtgagaaggcctatgg

SEQ ID NO: 3087 - DNA, 23 bp, Artificial Sequence
  Description of Artificial Sequence: Synthetic oligonucleotide
gggaaagaaaaagggtgagaagg

SEQ ID NO: 3088 - DNA, 23 bp, Artificial Sequence
  Description of Artificial Sequence: Synthetic oligonucleotide
cagccagagggaaagaaaaaggg

SEQ ID NO: 3089 - DNA, 23 bp, Artificial Sequence
  Description of Artificial Sequence: Synthetic oligonucleotide
tcagccagagggaaagaaaaagg

SEQ ID NO: 3090 - DNA, 23 bp, Artificial Sequence
  Description of Artificial Sequence: Synthetic oligonucleotide
tcaccctttttctttccctctgg

SEQ ID NO: 3091 - DNA, 23 bp, Artificial Sequence
  Description of Artificial Sequence: Synthetic oligonucleotide
gctggccacattcagccagaggg

SEQ ID NO: 3092 - DNA, 23 bp, Artificial Sequence
  Description of Artificial Sequence: Synthetic oligonucleotide
tgctggccacattcagccagagg

SEQ ID NO: 3093 - DNA, 23 bp, Artificial Sequence
  Description of Artificial Sequence: Synthetic oligonucleotide
tctttccctctggctgaatgtgg

SEQ ID NO: 3094 - DNA, 23 bp, Artificial Sequence
  Description of Artificial Sequence: Synthetic oligonucleotide
ctggctgaatgtggccagcacgg

SEQ ID NO: 3095 - DNA, 23 bp, Artificial Sequence
  Description of Artificial Sequence: Synthetic oligonucleotide
tggctgaatgtggccagcacggg

SEQ ID NO: 3096 - DNA, 23 bp, Artificial Sequence
  Description of Artificial Sequence: Synthetic oligonucleotide
atggccttggaagcccgtgctgg

SEQ ID NO: 3097 - DNA, 23 bp, Artificial Sequence
  Description of Artificial Sequence: Synthetic oligonucleotide
gtggccagcacgggcttccaagg

SEQ ID NO: 3098 - DNA, 23 bp, Artificial Sequence
  Description of Artificial Sequence: Synthetic oligonucleotide
tgcagacgagttgatggccttgg

SEQ ID NO: 3099 - DNA, 23 bp, Artificial Sequence
  Description of Artificial Sequence: Synthetic oligonucleotide
ggctgctgcagacgagttgatgg

SEQ ID NO: 3100 - DNA, 23 bp, Artificial Sequence
  Description of Artificial Sequence: Synthetic oligonucleotide
ctgaggccctgcaaggcatgggg

SEQ ID NO: 3101 - DNA, 23 bp, Artificial Sequence
  Description of Artificial Sequence: Synthetic oligonucleotide
tctgaggccctgcaaggcatggg

SEQ ID NO: 3102 - DNA, 23 bp, Artificial Sequence
  Description of Artificial Sequence: Synthetic oligonucleotide
ctctgaggccctgcaaggcatgg

SEQ ID NO: 3103 - DNA, 23 bp, Artificial Sequence
  Description of Artificial Sequence: Synthetic oligonucleotide
gcagcagccccatgccttgcagg

SEQ ID NO: 3104 - DNA, 23 bp, Artificial Sequence
  Description of Artificial Sequence: Synthetic oligonucleotide
cagcagccccatgccttgcaggg

SEQ ID NO: 3105 - DNA, 23 bp, Artificial Sequence
  Description of Artificial Sequence: Synthetic oligonucleotide
ggaagctctgaggccctgcaagg

SEQ ID NO: 3106 - DNA, 23 bp, Artificial Sequence
  Description of Artificial Sequence: Synthetic oligonucleotide
ataggcaggaggaagctctgagg

SEQ ID NO: 3107 - DNA, 23 bp, Artificial Sequence
  Description of Artificial Sequence: Synthetic oligonucleotide
accacactgtcataggcaggagg

SEQ ID NO: 3108 - DNA, 23 bp, Artificial Sequence
  Description of Artificial Sequence: Synthetic oligonucleotide
aaaaccacactgtcataggcagg

SEQ ID NO: 3109 - DNA, 23 bp, Artificial Sequence
  Description of Artificial Sequence: Synthetic oligonucleotide
aaccaaaaccacactgtcatagg

SEQ ID NO: 3110 - DNA, 23 bp, Artificial Sequence
  Description of Artificial Sequence: Synthetic oligonucleotide
tcctcctgcctatgacagtgtgg

SEQ ID NO: 3111 - DNA, 23 bp, Artificial Sequence
  Description of Artificial Sequence: Synthetic oligonucleotide
tgcctatgacagtgtggttttgg

SEQ ID NO: 3112 - DNA, 23 bp, Artificial Sequence
  Description of Artificial Sequence: Synthetic oligonucleotide
gtggttttggttcccacacttgg

SEQ ID NO: 3113 - DNA, 23 bp, Artificial Sequence
  Description of Artificial Sequence: Synthetic oligonucleotide
tggttttggttcccacacttggg

SEQ ID NO: 3114 - DNA, 23 bp, Artificial Sequence
  Description of Artificial Sequence: Synthetic oligonucleotide
ttcaatctgatcccaagtgtggg

SEQ ID NO: 3115 - DNA, 23 bp, Artificial Sequence
  Description of Artificial Sequence: Synthetic oligonucleotide
tttcaatctgatcccaagtgtgg

SEQ ID NO: 3116 - DNA, 23 bp, Artificial Sequence
  Description of Artificial Sequence: Synthetic oligonucleotide
cagattgaaactcgcctccgtgg

SEQ ID NO: 3117 - DNA, 23 bp, Artificial Sequence
  Description of Artificial Sequence: Synthetic oligonucleotide
gtcccatattctcaccacggagg

SEQ ID NO: 3118 - DNA, 23 bp, Artificial Sequence
  Description of Artificial Sequence: Synthetic oligonucleotide
tatgtcccatattctcaccacgg

SEQ ID NO: 3119 - DNA, 23 bp, Artificial Sequence
  Description of Artificial Sequence: Synthetic oligonucleotide
tcgcctccgtggtgagaatatgg

SEQ ID NO: 3120 - DNA, 23 bp, Artificial Sequence
  Description of Artificial Sequence: Synthetic oligonucleotide
cgcctccgtggtgagaatatggg

SEQ ID NO: 3121 - DNA, 23 bp, Artificial Sequence
  Description of Artificial Sequence: Synthetic oligonucleotide
gaatatgggacatagagcctcgg

SEQ ID NO: 3122 - DNA, 23 bp, Artificial Sequence
  Description of Artificial Sequence: Synthetic oligonucleotide
gctgctcaccaaggtcaccgagg

SEQ ID NO: 3123 - DNA, 23 bp, Artificial Sequence
  Description of Artificial Sequence: Synthetic oligonucleotide
acatagagcctcggtgaccttgg

SEQ ID NO: 3124 - DNA, 23 bp, Artificial Sequence
  Description of Artificial Sequence: Synthetic oligonucleotide
gcctggactgctgctcaccaagg

SEQ ID NO: 3125 - DNA, 23 bp, Artificial Sequence
  Description of Artificial Sequence: Synthetic oligonucleotide
accttggtgagcagcagtccagg

SEQ ID NO: 3126 - DNA, 23 bp, Artificial Sequence
  Description of Artificial Sequence: Synthetic oligonucleotide
cccaggctgagcaggtggcctgg

SEQ ID NO: 3127 - DNA, 23 bp, Artificial Sequence
  Description of Artificial Sequence: Synthetic oligonucleotide
ccaaccccaggctgagcaggtgg

SEQ ID NO: 3128 - DNA, 23 bp, Artificial Sequence
  Description of Artificial Sequence: Synthetic oligonucleotide
cccccaaccccaggctgagcagg

SEQ ID NO: 3129 - DNA, 23 bp, Artificial Sequence
  Description of Artificial Sequence: Synthetic oligonucleotide
tccaggccacctgctcagcctgg

SEQ ID NO: 3130 - DNA, 23 bp, Artificial Sequence
  Description of Artificial Sequence: Synthetic oligonucleotide
ccaggccacctgctcagcctggg

SEQ ID NO: 3131 - DNA, 23 bp, Artificial Sequence
  Description of Artificial Sequence: Synthetic oligonucleotide
caggccacctgctcagcctgggg

SEQ ID NO: 3132 - DNA, 23 bp, Artificial Sequence
  Description of Artificial Sequence: Synthetic oligonucleotide
ccacctgctcagcctggggttgg

SEQ ID NO: 3133 - DNA, 23 bp, Artificial Sequence
  Description of Artificial Sequence: Synthetic oligonucleotide
cacctgctcagcctggggttggg

SEQ ID NO: 3134 - DNA, 23 bp, Artificial Sequence
  Description of Artificial Sequence: Synthetic oligonucleotide
gaggagccccccccaaccccagg

SEQ ID NO: 3135 - DNA, 23 bp, Artificial Sequence
  Description of Artificial Sequence: Synthetic oligonucleotide
acctgctcagcctggggttgggg

SEQ ID NO: 3136 - DNA, 23 bp, Artificial Sequence
  Description of Artificial Sequence: Synthetic oligonucleotide
cctgctcagcctggggttggggg

SEQ ID NO: 3137 - DNA, 23 bp, Artificial Sequence
  Description of Artificial Sequence: Synthetic oligonucleotide
ctgctcagcctggggttgggggg

SEQ ID NO: 3138 - DNA, 23 bp, Artificial Sequence
  Description of Artificial Sequence: Synthetic oligonucleotide
tgctcagcctggggttggggggg

SEQ ID NO: 3139 - DNA, 23 bp, Artificial Sequence
  Description of Artificial Sequence: Synthetic oligonucleotide
gctcagcctggggttgggggggg

SEQ ID NO: 3140 - DNA, 23 bp, Artificial Sequence
  Description of Artificial Sequence: Synthetic oligonucleotide
gcaaggaccagtcaaggaggagg

SEQ ID NO: 3141 - DNA, 23 bp, Artificial Sequence
  Description of Artificial Sequence: Synthetic oligonucleotide
aatgcaaggaccagtcaaggagg

SEQ ID NO: 3142 - DNA, 23 bp, Artificial Sequence
  Description of Artificial Sequence: Synthetic oligonucleotide
gggggctcctcctccttgactgg

SEQ ID NO: 3143 - DNA, 23 bp, Artificial Sequence
  Description of Artificial Sequence: Synthetic oligonucleotide
gcaaatgcaaggaccagtcaagg

SEQ ID NO: 3144 - DNA, 23 bp, Artificial Sequence
  Description of Artificial Sequence: Synthetic oligonucleotide
gctggatggaggcaaatgcaagg

SEQ ID NO: 3145 - DNA, 23 bp, Artificial Sequence
  Description of Artificial Sequence: Synthetic oligonucleotide
agcccagacaggctggatggagg

SEQ ID NO: 3146 - DNA, 23 bp, Artificial Sequence
  Description of Artificial Sequence: Synthetic oligonucleotide
gagagcccagacaggctggatgg

SEQ ID NO: 3147 - DNA, 23 bp, Artificial Sequence
  Description of Artificial Sequence: Synthetic oligonucleotide
ctcggagagcccagacaggctgg

SEQ ID NO: 3148 - DNA, 23 bp, Artificial Sequence
  Description of Artificial Sequence: Synthetic oligonucleotide
ttgcctccatccagcctgtctgg

SEQ ID NO: 3149 - DNA, 23 bp, Artificial Sequence
  Description of Artificial Sequence: Synthetic oligonucleotide
tgcctccatccagcctgtctggg

SEQ ID NO: 3150 - DNA, 23 bp, Artificial Sequence
  Description of Artificial Sequence: Synthetic oligonucleotide
ttgcctcggagagcccagacagg

SEQ ID NO: 3151 - DNA, 23 bp, Artificial Sequence
  Description of Artificial Sequence: Synthetic oligonucleotide
cagcctgtctgggctctccgagg

SEQ ID NO: 3152 - DNA, 23 bp, Artificial Sequence
  Description of Artificial Sequence: Synthetic oligonucleotide
gtctgggctctccgaggcaatgg

SEQ ID NO: 3153 - DNA, 23 bp, Artificial Sequence
  Description of Artificial Sequence: Synthetic oligonucleotide
cctgctggtctccattgcctcgg

SEQ ID NO: 3154 - DNA, 23 bp, Artificial Sequence
  Description of Artificial Sequence: Synthetic oligonucleotide
ccgaggcaatggagaccagcagg

SEQ ID NO: 3155 - DNA, 23 bp, Artificial Sequence
  Description of Artificial Sequence: Synthetic oligonucleotide
tgacccatcgtgactcctgctgg

SEQ ID NO: 3156 - DNA, 23 bp, Artificial Sequence
  Description of Artificial Sequence: Synthetic oligonucleotide
gagaccagcaggagtcacgatgg

SEQ ID NO: 3157 - DNA, 23 bp, Artificial Sequence
  Description of Artificial Sequence: Synthetic oligonucleotide
agaccagcaggagtcacgatggg

SEQ ID NO: 3158 - DNA, 23 bp, Artificial Sequence
  Description of Artificial Sequence: Synthetic oligonucleotide
agcaggagtcacgatgggtcagg

SEQ ID NO: 3159 - DNA, 23 bp, Artificial Sequence
  Description of Artificial Sequence: Synthetic oligonucleotide
gatgggtcaggagccccctttgg

SEQ ID NO: 3160 - DNA, 23 bp, Artificial Sequence
  Description of Artificial Sequence: Synthetic oligonucleotide
atgggtcaggagccccctttggg

SEQ ID NO: 3161 - DNA, 23 bp, Artificial Sequence
  Description of Artificial Sequence: Synthetic oligonucleotide
gcagggctgaggcccaaaggggg

SEQ ID NO: 3162 - DNA, 23 bp, Artificial Sequence
  Description of Artificial Sequence: Synthetic oligonucleotide
ggcagggctgaggcccaaagggg

SEQ ID NO: 3163 - DNA, 23 bp, Artificial Sequence
  Description of Artificial Sequence: Synthetic oligonucleotide
gggcagggctgaggcccaaaggg

SEQ ID NO: 3164 - DNA, 23 bp, Artificial Sequence
  Description of Artificial Sequence: Synthetic oligonucleotide
agggcagggctgaggcccaaagg

SEQ ID NO: 3165 - DNA, 23 bp, Artificial Sequence
  Description of Artificial Sequence: Synthetic oligonucleotide
tagggggcagggcagggctgagg

SEQ ID NO: 3166 - DNA, 23 bp, Artificial Sequence
  Description of Artificial Sequence: Synthetic oligonucleotide
ctactttagggggcagggcaggg

SEQ ID NO: 3167 - DNA, 23 bp, Artificial Sequence
  Description of Artificial Sequence: Synthetic oligonucleotide
gctactttagggggcagggcagg

SEQ ID NO: 3168 - DNA, 23 bp, Artificial Sequence
  Description of Artificial Sequence: Synthetic oligonucleotide
aagtgctactttagggggcaggg

SEQ ID NO: 3169 - DNA, 23 bp, Artificial Sequence
  Description of Artificial Sequence: Synthetic oligonucleotide
caagtgctactttagggggcagg

SEQ ID NO: 3170 - DNA, 23 bp, Artificial Sequence
  Description of Artificial Sequence: Synthetic oligonucleotide
tatccaagtgctactttaggggg

SEQ ID NO: 3171 - DNA, 23 bp, Artificial Sequence
  Description of Artificial Sequence: Synthetic oligonucleotide
ttatccaagtgctactttagggg

SEQ ID NO: 3172 - DNA, 23 bp, Artificial Sequence
  Description of Artificial Sequence: Synthetic oligonucleotide
cttatccaagtgctactttaggg

SEQ ID NO: 3173 - DNA, 23 bp, Artificial Sequence
  Description of Artificial Sequence: Synthetic oligonucleotide
gcttatccaagtgctactttagg

SEQ ID NO: 3174 - DNA, 23 bp, Artificial Sequence
  Description of Artificial Sequence: Synthetic oligonucleotide
ctgccccctaaagtagcacttgg

SEQ ID NO: 3175 - DNA, 23 bp, Artificial Sequence
  Description of Artificial Sequence: Synthetic oligonucleotide
attattatacttactatttatgg

SEQ ID NO: 3176 - DNA, 23 bp, Artificial Sequence
  Description of Artificial Sequence: Synthetic oligonucleotide
ttattatacttactatttatggg

SEQ ID NO: 3177 - DNA, 23 bp, Artificial Sequence
  Description of Artificial Sequence: Synthetic oligonucleotide
atacttactatttatgggtgtgg

SEQ ID NO: 3178 - DNA, 23 bp, Artificial Sequence
  Description of Artificial Sequence: Synthetic oligonucleotide
ctatttatgggtgtggtgaatgg

SEQ ID NO: 3179 - DNA, 23 bp, Artificial Sequence
  Description of Artificial Sequence: Synthetic oligonucleotide
tatttatgggtgtggtgaatggg

SEQ ID NO: 3180 - DNA, 23 bp, Artificial Sequence
  Description of Artificial Sequence: Synthetic oligonucleotide
tatgggtgtggtgaatgggatgg

SEQ ID NO: 3181 - DNA, 23 bp, Artificial Sequence
  Description of Artificial Sequence: Synthetic oligonucleotide
tgtggtgaatgggatggcaaagg

SEQ ID NO: 3182 - DNA, 23 bp, Artificial Sequence
  Description of Artificial Sequence: Synthetic oligonucleotide
gtttggtgatcagtaagacttgg

SEQ ID NO: 3183 - DNA, 23 bp, Artificial Sequence
  Description of Artificial Sequence: Synthetic oligonucleotide
ccaggatatatcttaaggtttgg

SEQ ID NO: 3184 - DNA, 23 bp, Artificial Sequence
  Description of Artificial Sequence: Synthetic oligonucleotide
agctgccaggatatatcttaagg

SEQ ID NO: 3185 - DNA, 23 bp, Artificial Sequence
  Description of Artificial Sequence: Synthetic oligonucleotide
ccaaaccttaagatatatcctgg

SEQ ID NO: 3186 - DNA, 23 bp, Artificial Sequence
  Description of Artificial Sequence: Synthetic oligonucleotide
ccaagggtctactagctgccagg

SEQ ID NO: 3187 - DNA, 23 bp, Artificial Sequence
  Description of Artificial Sequence: Synthetic oligonucleotide
cctggcagctagtagacccttgg

SEQ ID NO: 3188 - DNA, 23 bp, Artificial Sequence
  Description of Artificial Sequence: Synthetic oligonucleotide
ctggcagctagtagacccttggg

SEQ ID NO: 3189 - DNA, 23 bp, Artificial Sequence
  Description of Artificial Sequence: Synthetic oligonucleotide
tttctgttcatttagcccaaggg

SEQ ID NO: 3190 - DNA, 23 bp, Artificial Sequence
  Description of Artificial Sequence: Synthetic oligonucleotide
ttttctgttcatttagcccaagg

SEQ ID NO: 3191 - DNA, 23 bp, Artificial Sequence
  Description of Artificial Sequence: Synthetic oligonucleotide
gggctaaatgaacagaaaactgg

SEQ ID NO: 3192 - DNA, 23 bp, Artificial Sequence
  Description of Artificial Sequence: Synthetic oligonucleotide
ataaaaatgtaaactgtagtagg

SEQ ID NO: 3193 - DNA, 23 bp, Artificial Sequence
  Description of Artificial Sequence: Synthetic oligonucleotide
tacagtttacatttttataaagg

SEQ ID NO: 3194 - DNA, 23 bp, Artificial Sequence
  Description of Artificial Sequence: Synthetic oligonucleotide
agtagatttctaaaatcccgtgg

SEQ ID NO: 3195 - DNA, 23 bp, Artificial Sequence
  Description of Artificial Sequence: Synthetic oligonucleotide
gatttctaaaatcccgtggtagg

SEQ ID NO: 3196 - DNA, 23 bp, Artificial Sequence
  Description of Artificial Sequence: Synthetic oligonucleotide
aactcaagagagcctaccacggg

SEQ ID NO: 3197 - DNA, 23 bp, Artificial Sequence
  Description of Artificial Sequence: Synthetic oligonucleotide
aaactcaagagagcctaccacgg

SEQ ID NO: 3198 - DNA, 23 bp, Artificial Sequence
  Description of Artificial Sequence: Synthetic oligonucleotide
ttatttgtagctgaacttcaggg

SEQ ID NO: 3199 - DNA, 23 bp, Artificial Sequence
  Description of Artificial Sequence: Synthetic oligonucleotide
cttatttgtagctgaacttcagg

SEQ ID NO: 3200 - DNA, 23 bp, Artificial Sequence
  Description of Artificial Sequence: Synthetic oligonucleotide
tgagcatttactctgttgtcagg

SEQ ID NO: 3201 - DNA, 23 bp, Artificial Sequence
  Description of Artificial Sequence: Synthetic oligonucleotide
aacctaaagcactcggcacgggg

SEQ ID NO: 3202 - DNA, 23 bp, Artificial Sequence
  Description of Artificial Sequence: Synthetic oligonucleotide
gaacctaaagcactcggcacggg

SEQ ID NO: 3203 - DNA, 23 bp, Artificial Sequence
  Description of Artificial Sequence: Synthetic oligonucleotide
tgaacctaaagcactcggcacgg

SEQ ID NO: 3204 - DNA, 23 bp, Artificial Sequence
  Description of Artificial Sequence: Synthetic oligonucleotide
aattctgaacctaaagcactcgg

SEQ ID NO: 3205 - DNA, 23 bp, Artificial Sequence
  Description of Artificial Sequence: Synthetic oligonucleotide
ggccccgtgccgagtgctttagg

SEQ ID NO: 3206 - DNA, 23 bp, Artificial Sequence
  Description of Artificial Sequence: Synthetic oligonucleotide
catctcctagggctgctgtgggg

SEQ ID NO: 3207 - DNA, 23 bp, Artificial Sequence
  Description of Artificial Sequence: Synthetic oligonucleotide
tcatctcctagggctgctgtggg

SEQ ID NO: 3208 - DNA, 23 bp, Artificial Sequence
  Description of Artificial Sequence: Synthetic oligonucleotide
ttcatctcctagggctgctgtgg

SEQ ID NO: 3209 - DNA, 23 bp, Artificial Sequence
  Description of Artificial Sequence: Synthetic oligonucleotide
gtcatccccacagcagccctagg

SEQ ID NO: 3210 - DNA, 23 bp, Artificial Sequence
  Description of Artificial Sequence: Synthetic oligonucleotide
agaattgcattcatctcctaggg

SEQ ID NO: 3211 - DNA, 23 bp, Artificial Sequence
  Description of Artificial Sequence: Synthetic oligonucleotide
aagaattgcattcatctcctagg

SEQ ID NO: 3212 - DNA, 23 bp, Artificial Sequence
  Description of Artificial Sequence: Synthetic oligonucleotide
caacttccttatcagtcaagtgg

SEQ ID NO: 3213 - DNA, 23 bp, Artificial Sequence
  Description of Artificial Sequence: Synthetic oligonucleotide
ttatgtccacttgactgataagg

SEQ ID NO: 3214 - DNA, 23 bp, Artificial Sequence
  Description of Artificial Sequence: Synthetic oligonucleotide
cttgactgataaggaagttgagg

SEQ ID NO: 3215 - DNA, 23 bp, Artificial Sequence
  Description of Artificial Sequence: Synthetic oligonucleotide
aaggaagttgaggttcaaagagg

SEQ ID NO: 3216 - DNA, 23 bp, Artificial Sequence
  Description of Artificial Sequence: Synthetic oligonucleotide
agaggctaaatgactctcccagg

SEQ ID NO: 3217 - DNA, 23 bp, Artificial Sequence
  Description of Artificial Sequence: Synthetic oligonucleotide
gaggctaaatgactctcccaggg

SEQ ID NO: 3218 - DNA, 23 bp, Artificial Sequence
  Description of Artificial Sequence: Synthetic oligonucleotide
ctttccagctgtgggaccctggg

SEQ ID NO: 3219 - DNA, 23 bp, Artificial Sequence
  Description of Artificial Sequence: Synthetic oligonucleotide
actttccagctgtgggaccctgg

SEQ ID NO: 3220 - DNA, 23 bp, Artificial Sequence
  Description of Artificial Sequence: Synthetic oligonucleotide
ctctcccagggtcccacagctgg

SEQ ID NO: 3221 - DNA, 23 bp, Artificial Sequence
  Description of Artificial Sequence: Synthetic oligonucleotide
tgtggccactttccagctgtggg

SEQ ID NO: 3222 - DNA, 23 bp, Artificial Sequence
  Description of Artificial Sequence: Synthetic oligonucleotide
ctgtggccactttccagctgtgg

SEQ ID NO: 3223 - DNA, 23 bp, Artificial Sequence
  Description of Artificial Sequence: Synthetic oligonucleotide
agggtcccacagctggaaagtgg

SEQ ID NO: 3224 - DNA, 23 bp, Artificial Sequence
  Description of Artificial Sequence: Synthetic oligonucleotide
cacagctggaaagtggccacagg

SEQ ID NO: 3225 - DNA, 23 bp, Artificial Sequence
  Description of Artificial Sequence: Synthetic oligonucleotide
acagctggaaagtggccacaggg

SEQ ID NO: 3226 - DNA, 23 bp, Artificial Sequence
  Description of Artificial Sequence: Synthetic oligonucleotide
gaaaaccagctggggccctgtgg

SEQ ID NO: 3227 - DNA, 23 bp, Artificial Sequence
  Description of Artificial Sequence: Synthetic oligonucleotide
agtggccacagggccccagctgg

SEQ ID NO: 3228 - DNA, 23 bp, Artificial Sequence
  Description of Artificial Sequence: Synthetic oligonucleotide
ctgccctagaaaaccagctgggg

SEQ ID NO: 3229 - DNA, 23 bp, Artificial Sequence
  Description of Artificial Sequence: Synthetic oligonucleotide
gctgccctagaaaaccagctggg

SEQ ID NO: 3230 - DNA, 23 bp, Artificial Sequence
  Description of Artificial Sequence: Synthetic oligonucleotide
tgctgccctagaaaaccagctgg

SEQ ID NO: 3231 - DNA, 23 bp, Artificial Sequence
  Description of Artificial Sequence: Synthetic oligonucleotide
agggccccagctggttttctagg

SEQ ID NO: 3232 - DNA, 23 bp, Artificial Sequence
  Description of Artificial Sequence: Synthetic oligonucleotide
gggccccagctggttttctaggg

SEQ ID NO: 3233 - DNA, 23 bp, Artificial Sequence
  Description of Artificial Sequence: Synthetic oligonucleotide
agctggttttctagggcagcagg

SEQ ID NO: 3234 - DNA, 23 bp, Artificial Sequence
  Description of Artificial Sequence: Synthetic oligonucleotide
tttctagggcagcaggcagaagg

SEQ ID NO: 3235 - DNA, 23 bp, Artificial Sequence
  Description of Artificial Sequence: Synthetic oligonucleotide
agggcagcaggcagaaggcgagg

SEQ ID NO: 3236 - DNA, 23 bp, Artificial Sequence
  Description of Artificial Sequence: Synthetic oligonucleotide
gcagcaggcagaaggcgaggagg

SEQ ID NO: 3237 - DNA, 23 bp, Artificial Sequence
  Description of Artificial Sequence: Synthetic oligonucleotide
ggcagaaggcgaggaggatctgg

SEQ ID NO: 3238 - DNA, 23 bp, Artificial Sequence
  Description of Artificial Sequence: Synthetic oligonucleotide
gcagaaggcgaggaggatctggg

SEQ ID NO: 3239 - DNA, 23 bp, Artificial Sequence
  Description of Artificial Sequence: Synthetic oligonucleotide
cgaggaggatctgggccctgtgg

SEQ ID NO: 3240 - DNA, 23 bp, Artificial Sequence
  Description of Artificial Sequence: Synthetic oligonucleotide
gatgaggctggggcaccacaggg

SEQ ID NO: 3241 - DNA, 23 bp, Artificial Sequence
  Description of Artificial Sequence: Synthetic oligonucleotide
agatgaggctggggcaccacagg

SEQ ID NO: 3242 - DNA, 23 bp, Artificial Sequence
  Description of Artificial Sequence: Synthetic oligonucleotide
aggaccctcagatgaggctgggg

SEQ ID NO: 3243 - DNA, 23 bp, Artificial Sequence
  Description of Artificial Sequence: Synthetic oligonucleotide
gaggaccctcagatgaggctggg

SEQ ID NO: 3244 - DNA, 23 bp, Artificial Sequence
  Description of Artificial Sequence: Synthetic oligonucleotide
tgaggaccctcagatgaggctgg

SEQ ID NO: 3245 - DNA, 23 bp, Artificial Sequence
  Description of Artificial Sequence: Synthetic oligonucleotide
tggtgccccagcctcatctgagg

SEQ ID NO: 3246 - DNA, 23 bp, Artificial Sequence
  Description of Artificial Sequence: Synthetic oligonucleotide
cagatgaggaccctcagatgagg

SEQ ID NO: 3247 - DNA, 23 bp, Artificial Sequence
  Description of Artificial Sequence: Synthetic oligonucleotide
ggtgccccagcctcatctgaggg

SEQ ID NO: 3248 - DNA, 23 bp, Artificial Sequence
  Description of Artificial Sequence: Synthetic oligonucleotide
ggatcctgttctctcagatgagg

SEQ ID NO: 3249 - DNA, 23 bp, Artificial Sequence
  Description of Artificial Sequence: Synthetic oligonucleotide
gggtcctcatctgagagaacagg

SEQ ID NO: 3250 - DNA, 23 bp, Artificial Sequence
  Description of Artificial Sequence: Synthetic oligonucleotide
tgcagcctgcccatgctgtgagg

SEQ ID NO: 3251 - DNA, 23 bp, Artificial Sequence
  Description of Artificial Sequence: Synthetic oligonucleotide
agaacaggatcctcacagcatgg

SEQ ID NO: 3252 - DNA, 23 bp, Artificial Sequence
  Description of Artificial Sequence: Synthetic oligonucleotide
gaacaggatcctcacagcatggg

SEQ ID NO: 3253 - DNA, 23 bp, Artificial Sequence
  Description of Artificial Sequence: Synthetic oligonucleotide
aggatcctcacagcatgggcagg

SEQ ID NO: 3254 - DNA, 23 bp, Artificial Sequence
  Description of Artificial Sequence: Synthetic oligonucleotide
cagcatgggcaggctgcaagtgg

SEQ ID NO: 3255 - DNA, 23 bp, Artificial Sequence
  Description of Artificial Sequence: Synthetic oligonucleotide
caggctgcaagtggtccctgagg

SEQ ID NO: 3256 - DNA, 23 bp, Artificial Sequence
  Description of Artificial Sequence: Synthetic oligonucleotide
tccactccacgataacctcaggg

SEQ ID NO: 3257 - DNA, 23 bp, Artificial Sequence
  Description of Artificial Sequence: Synthetic oligonucleotide
gtccactccacgataacctcagg

SEQ ID NO: 3258 - DNA, 23 bp, Artificial Sequence
  Description of Artificial Sequence: Synthetic oligonucleotide
agtggtccctgaggttatcgtgg

SEQ ID NO: 3259 - DNA, 23 bp, Artificial Sequence
  Description of Artificial Sequence: Synthetic oligonucleotide
tccctgaggttatcgtggagtgg

SEQ ID NO: 3260 - DNA, 23 bp, Artificial Sequence
  Description of Artificial Sequence: Synthetic oligonucleotide
aacagactcaggtcaagtcaggg

SEQ ID NO: 3261 - DNA, 23 bp, Artificial Sequence
  Description of Artificial Sequence: Synthetic oligonucleotide
aaacagactcaggtcaagtcagg

SEQ ID NO: 3262 - DNA, 23 bp, Artificial Sequence
  Description of Artificial Sequence: Synthetic oligonucleotide
tgacttgacctgagtctgtttgg

SEQ ID NO: 3263 - DNA, 23 bp, Artificial Sequence
  Description of Artificial Sequence: Synthetic oligonucleotide
ggccaaggcccccggaggcctgg

SEQ ID NO: 3264 - DNA, 23 bp, Artificial Sequence
  Description of Artificial Sequence: Synthetic oligonucleotide
ggcagggccaaggcccccggagg

SEQ ID NO: 3265 - DNA, 23 bp, Artificial Sequence
  Description of Artificial Sequence: Synthetic oligonucleotide
ccaggcagggccaaggcccccgg

SEQ ID NO: 3266 - DNA, 23 bp, Artificial Sequence
  Description of Artificial Sequence: Synthetic oligonucleotide
ggccaggcctccgggggccttgg

SEQ ID NO: 3267 - DNA, 23 bp, Artificial Sequence
  Description of Artificial Sequence: Synthetic oligonucleotide
tggtgggccaggcagggccaagg

SEQ ID NO: 3268 - DNA, 23 bp, Artificial Sequence
  Description of Artificial Sequence: Synthetic oligonucleotide
ccgggggccttggccctgcctgg

SEQ ID NO: 3269 - DNA, 23 bp, Artificial Sequence
  Description of Artificial Sequence: Synthetic oligonucleotide
aagagatggtgggccaggcaggg

SEQ ID NO: 3270 - DNA, 23 bp, Artificial Sequence
  Description of Artificial Sequence: Synthetic oligonucleotide
gaagagatggtgggccaggcagg

SEQ ID NO: 3271 - DNA, 23 bp, Artificial Sequence
  Description of Artificial Sequence: Synthetic oligonucleotide
ggcagaagagatggtgggccagg

SEQ ID NO: 3272 - DNA, 23 bp, Artificial Sequence
  Description of Artificial Sequence: Synthetic oligonucleotide
aggatggcagaagagatggtggg

SEQ ID NO: 3273 - DNA, 23 bp, Artificial Sequence
  Description of Artificial Sequence: Synthetic oligonucleotide
aaggatggcagaagagatggtgg

SEQ ID NO: 3274 - DNA, 23 bp, Artificial Sequence
  Description of Artificial Sequence: Synthetic oligonucleotide
acaaaggatggcagaagagatgg

SEQ ID NO: 3275 - DNA, 23 bp, Artificial Sequence
  Description of Artificial Sequence: Synthetic oligonucleotide
ccctcccccgccacaaaggatgg

SEQ ID NO: 3276 - DNA, 23 bp, Artificial Sequence
  Description of Artificial Sequence: Synthetic oligonucleotide
atctcttctgccatcctttgtgg

SEQ ID NO: 3277 - DNA, 23 bp, Artificial Sequence
  Description of Artificial Sequence: Synthetic oligonucleotide
tcttctgccatcctttgtggcgg

SEQ ID NO: 3278 - DNA, 23 bp, Artificial Sequence
  Description of Artificial Sequence: Synthetic oligonucleotide
tttcccctcccccgccacaaagg

SEQ ID NO: 3279 - DNA, 23 bp, Artificial Sequence
  Description of Artificial Sequence: Synthetic oligonucleotide
cttctgccatcctttgtggcggg

SEQ ID NO: 3280 - DNA, 23 bp, Artificial Sequence
  Description of Artificial Sequence: Synthetic oligonucleotide
ttctgccatcctttgtggcgggg

SEQ ID NO: 3281 - DNA, 23 bp, Artificial Sequence
  Description of Artificial Sequence: Synthetic oligonucleotide
tctgccatcctttgtggcggggg

SEQ ID NO: 3282 - DNA, 23 bp, Artificial Sequence
  Description of Artificial Sequence: Synthetic oligonucleotide
gccatcctttgtggcgggggagg

SEQ ID NO: 3283 - DNA, 23 bp, Artificial Sequence
  Description of Artificial Sequence: Synthetic oligonucleotide
ccatcctttgtggcgggggaggg

SEQ ID NO: 3284 - DNA, 23 bp, Artificial Sequence
  Description of Artificial Sequence: Synthetic oligonucleotide
catcctttgtggcgggggagggg

SEQ ID NO: 3285 - DNA, 23 bp, Artificial Sequence
  Description of Artificial Sequence: Synthetic oligonucleotide
aggggaaattcagagatctttgg

SEQ ID NO: 3286 - DNA, 23 bp, Artificial Sequence
  Description of Artificial Sequence: Synthetic oligonucleotide
ggggaaattcagagatctttggg

SEQ ID NO: 3287 - DNA, 23 bp, Artificial Sequence
  Description of Artificial Sequence: Synthetic oligonucleotide
ctttgggcgacttccctgcctgg

SEQ ID NO: 3288 - DNA, 23 bp, Artificial Sequence
  Description of Artificial Sequence: Synthetic oligonucleotide
ctgtgagctgggtccaggcaggg

SEQ ID NO: 3289 - DNA, 23 bp, Artificial Sequence
  Description of Artificial Sequence: Synthetic oligonucleotide
gctgtgagctgggtccaggcagg

SEQ ID NO: 3290 - DNA, 23 bp, Artificial Sequence
  Description of Artificial Sequence: Synthetic oligonucleotide
agaagctgtgagctgggtccagg

SEQ ID NO: 3291 - DNA, 23 bp, Artificial Sequence
  Description of Artificial Sequence: Synthetic oligonucleotide
tggccgagaagctgtgagctggg

SEQ ID NO: 3292 - DNA, 23 bp, Artificial Sequence
  Description of Artificial Sequence: Synthetic oligonucleotide
gtggccgagaagctgtgagctgg

SEQ ID NO: 3293 - DNA, 23 bp, Artificial Sequence
  Description of Artificial Sequence: Synthetic oligonucleotide
ggacccagctcacagcttctcgg

SEQ ID NO: 3294 - DNA, 23 bp, Artificial Sequence
  Description of Artificial Sequence: Synthetic oligonucleotide
cacaacccacacatttgcagtgg

SEQ ID NO: 3295 - DNA, 23 bp, Artificial Sequence
  Description of Artificial Sequence: Synthetic oligonucleotide
tctcggccactgcaaatgtgtgg

SEQ ID NO: 3296 - DNA, 23 bp, Artificial Sequence
  Description of Artificial Sequence: Synthetic oligonucleotide
ctcggccactgcaaatgtgtggg

SEQ ID NO: 3297 - DNA, 23 bp, Artificial Sequence
  Description of Artificial Sequence: Synthetic oligonucleotide
aagctcaagacacatcagtctgg

SEQ ID NO: 3298 - DNA, 23 bp, Artificial Sequence
  Description of Artificial Sequence: Synthetic oligonucleotide
actgatgtgtcttgagcttcagg

SEQ ID NO: 3299 - DNA, 23 bp, Artificial Sequence
  Description of Artificial Sequence: Synthetic oligonucleotide
cttcaggcttgcaagtgcagtgg

SEQ ID NO: 3300 - DNA, 23 bp, Artificial Sequence
  Description of Artificial Sequence: Synthetic oligonucleotide
ggcttgcaagtgcagtggagagg

SEQ ID NO: 3301 - DNA, 23 bp, Artificial Sequence
  Description of Artificial Sequence: Synthetic oligonucleotide
caagtgcagtggagaggcagtgg

SEQ ID NO: 3302 - DNA, 23 bp, Artificial Sequence
  Description of Artificial Sequence: Synthetic oligonucleotide
aagtgcagtggagaggcagtggg

SEQ ID NO: 3303 - DNA, 23 bp, Artificial Sequence
  Description of Artificial Sequence: Synthetic oligonucleotide
agtgcagtggagaggcagtgggg

SEQ ID NO: 3304 - DNA, 23 bp, Artificial Sequence
  Description of Artificial Sequence: Synthetic oligonucleotide
aggcagtggggagctattgaagg

SEQ ID NO: 3305 - DNA, 23 bp, Artificial Sequence
  Description of Artificial Sequence: Synthetic oligonucleotide
ggcagtggggagctattgaaggg

SEQ ID NO: 3306 - DNA, 23 bp, Artificial Sequence
  Description of Artificial Sequence: Synthetic oligonucleotide
gcagtggggagctattgaagggg

SEQ ID NO: 3307 - DNA, 23 bp, Artificial Sequence
  Description of Artificial Sequence: Synthetic oligonucleotide
ggggagctattgaaggggtctgg

SEQ ID NO: 3308 - DNA, 23 bp, Artificial Sequence
  Description of Artificial Sequence: Synthetic oligonucleotide
gggagctattgaaggggtctggg

SEQ ID NO: 3309 - DNA, 23 bp, Artificial Sequence
  Description of Artificial Sequence: Synthetic oligonucleotide
ggagctattgaaggggtctgggg

SEQ ID NO: 3310 - DNA, 23 bp, Artificial Sequence
  Description of Artificial Sequence: Synthetic oligonucleotide
ggggacagactcaatcacagagg

SEQ ID NO: 3311 - DNA, 23 bp, Artificial Sequence
  Description of Artificial Sequence: Synthetic oligonucleotide
cagcaggcagatcttctgaaagg

SEQ ID NO: 3312 - DNA, 23 bp, Artificial Sequence
  Description of Artificial Sequence: Synthetic oligonucleotide
cctctttgcccatgcacagcagg

SEQ ID NO: 3313 - DNA, 23 bp, Artificial Sequence
  Description of Artificial Sequence: Synthetic oligonucleotide
gaagatctgcctgctgtgcatgg

SEQ ID NO: 3314 - DNA, 23 bp, Artificial Sequence
  Description of Artificial Sequence: Synthetic oligonucleotide
aagatctgcctgctgtgcatggg

SEQ ID NO: 3315 - DNA, 23 bp, Artificial Sequence
  Description of Artificial Sequence: Synthetic oligonucleotide
cctgctgtgcatgggcaaagagg

SEQ ID NO: 3316 - DNA, 23 bp, Artificial Sequence
  Description of Artificial Sequence: Synthetic oligonucleotide
ctgctgtgcatgggcaaagaggg

SEQ ID NO: 3317 - DNA, 23 bp, Artificial Sequence
  Description of Artificial Sequence: Synthetic oligonucleotide
catgctctgaggtcagcaagtgg

SEQ ID NO: 3318 - DNA, 23 bp, Artificial Sequence
  Description of Artificial Sequence: Synthetic oligonucleotide
ctgagaaagcacatgctctgagg

SEQ ID NO: 3319 - DNA, 23 bp, Artificial Sequence
  Description of Artificial Sequence: Synthetic oligonucleotide
cagtgaccatgggacagcttggg

SEQ ID NO: 3320 - DNA, 23 bp, Artificial Sequence
  Description of Artificial Sequence: Synthetic oligonucleotide
tcagtgaccatgggacagcttgg

SEQ ID NO: 3321 - DNA, 23 bp, Artificial Sequence
  Description of Artificial Sequence: Synthetic oligonucleotide
gtagtgcccaagctgtcccatgg

SEQ ID NO: 3322 - DNA, 23 bp, Artificial Sequence
  Description of Artificial Sequence: Synthetic oligonucleotide
ctaactgggtcagtgaccatggg

SEQ ID NO: 3323 - DNA, 23 bp, Artificial Sequence
  Description of Artificial Sequence: Synthetic oligonucleotide
tctaactgggtcagtgaccatgg

SEQ ID NO: 3324 - DNA, 23 bp, Artificial Sequence
  Description of Artificial Sequence: Synthetic oligonucleotide
tccattcagtcattctaactggg

SEQ ID NO: 3325 - DNA, 23 bp, Artificial Sequence
  Description of Artificial Sequence: Synthetic oligonucleotide
gtccattcagtcattctaactgg

SEQ ID NO: 3326 - DNA, 23 bp, Artificial Sequence
  Description of Artificial Sequence: Synthetic oligonucleotide
acccagttagaatgactgaatgg

SEQ ID NO: 3327 - DNA, 23 bp, Artificial Sequence
  Description of Artificial Sequence: Synthetic oligonucleotide
tagaatgactgaatggactttgg

SEQ ID NO: 3328 - DNA, 23 bp, Artificial Sequence
  Description of Artificial Sequence: Synthetic oligonucleotide
actttggcttgtgtctcattagg

SEQ ID NO: 3329 - DNA, 23 bp, Artificial Sequence
  Description of Artificial Sequence: Synthetic oligonucleotide
tggaagactagaatggggctagg

SEQ ID NO: 3330 - DNA, 23 bp, Artificial Sequence
  Description of Artificial Sequence: Synthetic oligonucleotide
ctcactggaagactagaatgggg

SEQ ID NO: 3331 - DNA, 23 bp, Artificial Sequence
  Description of Artificial Sequence: Synthetic oligonucleotide
tctcactggaagactagaatggg

SEQ ID NO: 3332 - DNA, 23 bp, Artificial Sequence
  Description of Artificial Sequence: Synthetic oligonucleotide
atctcactggaagactagaatgg

SEQ ID NO: 3333 - DNA, 23 bp, Artificial Sequence
  Description of Artificial Sequence: Synthetic oligonucleotide
cactcatggacagatctcactgg

SEQ ID NO: 3334 - DNA, 23 bp, Artificial Sequence
  Description of Artificial Sequence: Synthetic oligonucleotide
ctgtgagattccttcactcatgg

SEQ ID NO: 3335 - DNA, 23 bp, Artificial Sequence
  Description of Artificial Sequence: Synthetic oligonucleotide
tgagatctgtccatgagtgaagg

SEQ ID NO: 3336 - DNA, 23 bp, Artificial Sequence
  Description of Artificial Sequence: Synthetic oligonucleotide
catgagtgaaggaatctcacagg

SEQ ID NO: 3337 - DNA, 23 bp, Artificial Sequence
  Description of Artificial Sequence: Synthetic oligonucleotide
gaaaaaacaaaatgcttctatgg

SEQ ID NO: 3338 - DNA, 23 bp, Artificial Sequence
  Description of Artificial Sequence: Synthetic oligonucleotide
aaaaaacaaaatgcttctatggg

SEQ ID NO: 3339 - DNA, 23 bp, Artificial Sequence
  Description of Artificial Sequence: Synthetic oligonucleotide
acaaaatgcttctatgggtgtgg

SEQ ID NO: 3340 - DNA, 23 bp, Artificial Sequence
  Description of Artificial Sequence: Synthetic oligonucleotide
gcttctatgggtgtggttgctgg

SEQ ID NO: 3341 - DNA, 23 bp, Artificial Sequence
  Description of Artificial Sequence: Synthetic oligonucleotide
tggcttctgtggtgtagataagg

SEQ ID NO: 3342 - DNA, 23 bp, Artificial Sequence
  Description of Artificial Sequence: Synthetic oligonucleotide
agtctgtgtgatggcttctgtgg

SEQ ID NO: 3343 - DNA, 23 bp, Artificial Sequence
  Description of Artificial Sequence: Synthetic oligonucleotide
aagaaagacagtctgtgtgatgg

SEQ ID NO: 3344 - DNA, 23 bp, Artificial Sequence
  Description of Artificial Sequence: Synthetic oligonucleotide
tcagggcacattctaacaatggg

SEQ ID NO: 3345 - DNA, 23 bp, Artificial Sequence
  Description of Artificial Sequence: Synthetic oligonucleotide
gtcagggcacattctaacaatgg

SEQ ID NO: 3346 - DNA, 23 bp, Artificial Sequence
  Description of Artificial Sequence: Synthetic oligonucleotide
ccctgtgggctgcttggtcaggg

SEQ ID NO: 3347 - DNA, 23 bp, Artificial Sequence
  Description of Artificial Sequence: Synthetic oligonucleotide
gccctgtgggctgcttggtcagg

SEQ ID NO: 3348 - DNA, 23 bp, Artificial Sequence
  Description of Artificial Sequence: Synthetic oligonucleotide
cccaggccctgtgggctgcttgg

SEQ ID NO: 3349 - DNA, 23 bp, Artificial Sequence
  Description of Artificial Sequence: Synthetic oligonucleotide
gccctgaccaagcagcccacagg

SEQ ID NO: 3350 - DNA, 23 bp, Artificial Sequence
  Description of Artificial Sequence: Synthetic oligonucleotide
ccctgaccaagcagcccacaggg

SEQ ID NO: 3351 - DNA, 23 bp, Artificial Sequence
  Description of Artificial Sequence: Synthetic oligonucleotide
gcctctgtcccaggccctgtggg

SEQ ID NO: 3352 - DNA, 23 bp, Artificial Sequence
  Description of Artificial Sequence: Synthetic oligonucleotide
agcctctgtcccaggccctgtgg

SEQ ID NO: 3353 - DNA, 23 bp, Artificial Sequence
  Description of Artificial Sequence: Synthetic oligonucleotide
accaagcagcccacagggcctgg

SEQ ID NO: 3354 - DNA, 23 bp, Artificial Sequence
  Description of Artificial Sequence: Synthetic oligonucleotide
ccaagcagcccacagggcctggg

SEQ ID NO: 3355 - DNA, 23 bp, Artificial Sequence
  Description of Artificial Sequence: Synthetic oligonucleotide
cagagatcagcctctgtcccagg

SEQ ID NO: 3356 - DNA, 23 bp, Artificial Sequence
  Description of Artificial Sequence: Synthetic oligonucleotide
gcccacagggcctgggacagagg

SEQ ID NO: 3357 - DNA, 23 bp, Artificial Sequence
  Description of Artificial Sequence: Synthetic oligonucleotide
gaggagaggtgagctcagttagg

SEQ ID NO: 3358 - DNA, 23 bp, Artificial Sequence
  Description of Artificial Sequence: Synthetic oligonucleotide
gtcaggaggagagggaggagagg

SEQ ID NO: 3359 - DNA, 23 bp, Artificial Sequence
  Description of Artificial Sequence: Synthetic oligonucleotide
aaccagtcaggaggagagggagg

SEQ ID NO: 3360 - DNA, 23 bp, Artificial Sequence
  Description of Artificial Sequence: Synthetic oligonucleotide
tctaaccagtcaggaggagaggg

SEQ ID NO: 3361 - DNA, 23 bp, Artificial Sequence
  Description of Artificial Sequence: Synthetic oligonucleotide
atctaaccagtcaggaggagagg

SEQ ID NO: 3362 - DNA, 23 bp, Artificial Sequence
  Description of Artificial Sequence: Synthetic oligonucleotide
ctcctccctctcctcctgactgg

SEQ ID NO: 3363 - DNA, 23 bp, Artificial Sequence
  Description of Artificial Sequence: Synthetic oligonucleotide
agaaaatctaaccagtcaggagg

SEQ ID NO: 3364 - DNA, 23 bp, Artificial Sequence
  Description of Artificial Sequence: Synthetic oligonucleotide
cctagaaaatctaaccagtcagg

SEQ ID NO: 3365 - DNA, 23 bp, Artificial Sequence
  Description of Artificial Sequence: Synthetic oligonucleotide
cctgactggttagattttctagg

SEQ ID NO: 3366 - DNA, 23 bp, Artificial Sequence
  Description of Artificial Sequence: Synthetic oligonucleotide
cagcgggcttgtgtcatcagggg

SEQ ID NO: 3367 - DNA, 23 bp, Artificial Sequence
  Description of Artificial Sequence: Synthetic oligonucleotide
ccagcgggcttgtgtcatcaggg

SEQ ID NO: 3368 - DNA, 23 bp, Artificial Sequence
  Description of Artificial Sequence: Synthetic oligonucleotide
cccagcgggcttgtgtcatcagg

SEQ ID NO: 3369 - DNA, 23 bp, Artificial Sequence
  Description of Artificial Sequence: Synthetic oligonucleotide
ccctgatgacacaagcccgctgg

SEQ ID NO: 3370 - DNA, 23 bp, Artificial Sequence
  Description of Artificial Sequence: Synthetic oligonucleotide
cctgatgacacaagcccgctggg

SEQ ID NO: 3371 - DNA, 23 bp, Artificial Sequence
  Description of Artificial Sequence: Synthetic oligonucleotide
aaacactgctggggcccagcggg

SEQ ID NO: 3372 - DNA, 23 bp, Artificial Sequence
  Description of Artificial Sequence: Synthetic oligonucleotide
taaacactgctggggcccagcgg

SEQ ID NO: 3373 - DNA, 23 bp, Artificial Sequence
  Description of Artificial Sequence: Synthetic oligonucleotide
aacccctctaaacactgctgggg

SEQ ID NO: 3374 - DNA, 23 bp, Artificial Sequence
  Description of Artificial Sequence: Synthetic oligonucleotide
caacccctctaaacactgctggg

SEQ ID NO: 3375 - DNA, 23 bp, Artificial Sequence
  Description of Artificial Sequence: Synthetic oligonucleotide
acaacccctctaaacactgctgg

SEQ ID NO: 3376 - DNA, 23 bp, Artificial Sequence
  Description of Artificial Sequence: Synthetic oligonucleotide
tgggccccagcagtgtttagagg

SEQ ID NO: 3377 - DNA, 23 bp, Artificial Sequence
  Description of Artificial Sequence: Synthetic oligonucleotide
gggccccagcagtgtttagaggg

SEQ ID NO: 3378 - DNA, 23 bp, Artificial Sequence
  Description of Artificial Sequence: Synthetic oligonucleotide
ggccccagcagtgtttagagggg

SEQ ID NO: 3379 - DNA, 23 bp, Artificial Sequence
  Description of Artificial Sequence: Synthetic oligonucleotide
agggcatgacacacatcagcagg

SEQ ID NO: 3380 - DNA, 23 bp, Artificial Sequence
  Description of Artificial Sequence: Synthetic oligonucleotide
tgctgatgtgtgtcatgccctgg

SEQ ID NO: 3381 - DNA, 23 bp, Artificial Sequence
  Description of Artificial Sequence: Synthetic oligonucleotide
gctgatgtgtgtcatgccctggg

SEQ ID NO: 3382 - DNA, 23 bp, Artificial Sequence
  Description of Artificial Sequence: Synthetic oligonucleotide
ctgatgtgtgtcatgccctgggg

SEQ ID NO: 3383 - DNA, 23 bp, Artificial Sequence
  Description of Artificial Sequence: Synthetic oligonucleotide
atgtgtgtcatgccctggggtgg

SEQ ID NO: 3384 - DNA, 23 bp, Artificial Sequence
  Description of Artificial Sequence: Synthetic oligonucleotide
tttatcattcatccaccccaggg

SEQ ID NO: 3385 - DNA, 23 bp, Artificial Sequence
  Description of Artificial Sequence: Synthetic oligonucleotide
atttatcattcatccaccccagg

SEQ ID NO: 3386 - DNA, 23 bp, Artificial Sequence
  Description of Artificial Sequence: Synthetic oligonucleotide
cctccagggacaatctaacaggg

SEQ ID NO: 3387 - DNA, 23 bp, Artificial Sequence
  Description of Artificial Sequence: Synthetic oligonucleotide
gcctccagggacaatctaacagg

SEQ ID NO: 3388 - DNA, 23 bp, Artificial Sequence
  Description of Artificial Sequence: Synthetic oligonucleotide
catccctgttagattgtccctgg

SEQ ID NO: 3389 - DNA, 23 bp, Artificial Sequence
  Description of Artificial Sequence: Synthetic oligonucleotide
ccctgttagattgtccctggagg

SEQ ID NO: 3390 - DNA, 23 bp, Artificial Sequence
  Description of Artificial Sequence: Synthetic oligonucleotide
gggtggggaagctgcctccaggg

SEQ ID NO: 3391 - DNA, 23 bp, Artificial Sequence
  Description of Artificial Sequence: Synthetic oligonucleotide
ggggtggggaagctgcctccagg

SEQ ID NO: 3392 - DNA, 23 bp, Artificial Sequence
  Description of Artificial Sequence: Synthetic oligonucleotide
ttgtggaggtgacaggggtgggg

SEQ ID NO: 3393 - DNA, 23 bp, Artificial Sequence
  Description of Artificial Sequence: Synthetic oligonucleotide
gttgtggaggtgacaggggtggg

SEQ ID NO: 3394 - DNA, 23 bp, Artificial Sequence
  Description of Artificial Sequence: Synthetic oligonucleotide
tgttgtggaggtgacaggggtgg

SEQ ID NO: 3395 - DNA, 23 bp, Artificial Sequence
  Description of Artificial Sequence: Synthetic oligonucleotide
gagtgttgtggaggtgacagggg

SEQ ID NO: 3396 - DNA, 23 bp, Artificial Sequence
  Description of Artificial Sequence: Synthetic oligonucleotide
agagtgttgtggaggtgacaggg

SEQ ID NO: 3397 - DNA, 23 bp, Artificial Sequence
  Description of Artificial Sequence: Synthetic oligonucleotide
gagagtgttgtggaggtgacagg

SEQ ID NO: 3398 - DNA, 23 bp, Artificial Sequence
  Description of Artificial Sequence: Synthetic oligonucleotide
taaatcggagagtgttgtggagg

SEQ ID NO: 3399 - DNA, 23 bp, Artificial Sequence
  Description of Artificial Sequence: Synthetic oligonucleotide
ctgtaaatcggagagtgttgtgg

SEQ ID NO: 3400 - DNA, 23 bp, Artificial Sequence
  Description of Artificial Sequence: Synthetic oligonucleotide
tcccatggggtgctgtaaatcgg

SEQ ID NO: 3401 - DNA, 23 bp, Artificial Sequence
  Description of Artificial Sequence: Synthetic oligonucleotide
ctccgatttacagcaccccatgg

SEQ ID NO: 3402 - DNA, 23 bp, Artificial Sequence
  Description of Artificial Sequence: Synthetic oligonucleotide
tccgatttacagcaccccatggg

SEQ ID NO: 3403 - DNA, 23 bp, Artificial Sequence
  Description of Artificial Sequence: Synthetic oligonucleotide
ggaagttctaatgtcccatgggg

SEQ ID NO: 3404 - DNA, 23 bp, Artificial Sequence
  Description of Artificial Sequence: Synthetic oligonucleotide
tggaagttctaatgtcccatggg

SEQ ID NO: 3405 - DNA, 23 bp, Artificial Sequence
  Description of Artificial Sequence: Synthetic oligonucleotide
gtggaagttctaatgtcccatgg

SEQ ID NO: 3406 - DNA, 23 bp, Artificial Sequence
  Description of Artificial Sequence: Synthetic oligonucleotide
ctgcttttggttgagctgagtgg

SEQ ID NO: 3407 - DNA, 23 bp, Artificial Sequence
  Description of Artificial Sequence: Synthetic oligonucleotide
gctgaagtcacatctgcttttgg

SEQ ID NO: 3408 - DNA, 23 bp, Artificial Sequence
  Description of Artificial Sequence: Synthetic oligonucleotide
gacttcagcagaaacttcagagg

SEQ ID NO: 3409 - DNA, 23 bp, Artificial Sequence
  Description of Artificial Sequence: Synthetic oligonucleotide
agaggctctgttgtttcattagg

SEQ ID NO: 3410 - DNA, 23 bp, Artificial Sequence
  Description of Artificial Sequence: Synthetic oligonucleotide
ggcagtgcagagaatgcctttgg

SEQ ID NO: 3411 - DNA, 23 bp, Artificial Sequence
  Description of Artificial Sequence: Synthetic oligonucleotide
gcagtgcagagaatgcctttggg

SEQ ID NO: 3412 - DNA, 23 bp, Artificial Sequence
  Description of Artificial Sequence: Synthetic oligonucleotide
cagtgcagagaatgcctttgggg

SEQ ID NO: 3413 - DNA, 23 bp, Artificial Sequence
  Description of Artificial Sequence: Synthetic oligonucleotide
tctgaggaacggctccccaaagg

SEQ ID NO: 3414 - DNA, 23 bp, Artificial Sequence
  Description of Artificial Sequence: Synthetic oligonucleotide
aagtcttgagttctgaggaacgg

SEQ ID NO: 3415 - DNA, 23 bp, Artificial Sequence
  Description of Artificial Sequence: Synthetic oligonucleotide
atgtcaagtcttgagttctgagg

SEQ ID NO: 3416 - DNA, 23 bp, Artificial Sequence
  Description of Artificial Sequence: Synthetic oligonucleotide
agaactcaagacttgacatctgg

SEQ ID NO: 3417 - DNA, 23 bp, Artificial Sequence
  Description of Artificial Sequence: Synthetic oligonucleotide
gaactcaagacttgacatctggg

SEQ ID NO: 3418 - DNA, 23 bp, Artificial Sequence
  Description of Artificial Sequence: Synthetic oligonucleotide
ctcaagacttgacatctgggagg

SEQ ID NO: 3419 - DNA, 23 bp, Artificial Sequence
  Description of Artificial Sequence: Synthetic oligonucleotide
aagtcttgagttctgaggaacgg

SEQ ID NO: 3420 - DNA, 23 bp, Artificial Sequence
  Description of Artificial Sequence: Synthetic oligonucleotide
atgtcaagtcttgagttctgagg

SEQ ID NO: 3421 - DNA, 23 bp, Artificial Sequence
  Description of Artificial Sequence: Synthetic oligonucleotide
agaactcaagacttgacatctgg

SEQ ID NO: 3422 - DNA, 23 bp, Artificial Sequence
  Description of Artificial Sequence: Synthetic oligonucleotide
gaactcaagacttgacatctggg

SEQ ID NO: 3423 - DNA, 23 bp, Artificial Sequence
  Description of Artificial Sequence: Synthetic oligonucleotide
ccctgcaaatagaaaggcaaggg

SEQ ID NO: 3424 - DNA, 23 bp, Artificial Sequence
  Description of Artificial Sequence: Synthetic oligonucleotide
accctgcaaatagaaaggcaagg

SEQ ID NO: 3425 - DNA, 23 bp, Artificial Sequence
  Description of Artificial Sequence: Synthetic oligonucleotide
aagtgaccctgcaaatagaaagg

SEQ ID NO: 3426 - DNA, 23 bp, Artificial Sequence
  Description of Artificial Sequence: Synthetic oligonucleotide
tcccttgcctttctatttgcagg

SEQ ID NO: 3427 - DNA, 23 bp, Artificial Sequence
  Description of Artificial Sequence: Synthetic oligonucleotide
cccttgcctttctatttgcaggg

SEQ ID NO: 3428 - DNA, 23 bp, Artificial Sequence
  Description of Artificial Sequence: Synthetic oligonucleotide
ctgacctcttgactatacattgg

SEQ ID NO: 3429 - DNA, 23 bp, Artificial Sequence
  Description of Artificial Sequence: Synthetic oligonucleotide
cttgccaatgtatagtcaagagg

SEQ ID NO: 3430 - DNA, 23 bp, Artificial Sequence
  Description of Artificial Sequence: Synthetic oligonucleotide
atagtcaagaggtcagagtgagg

SEQ ID NO: 3431 - DNA, 23 bp, Artificial Sequence
  Description of Artificial Sequence: Synthetic oligonucleotide
tagtcaagaggtcagagtgaggg

SEQ ID NO: 3432 - DNA, 23 bp, Artificial Sequence
  Description of Artificial Sequence: Synthetic oligonucleotide
tacagctgagctgcagccccagg

SEQ ID NO: 3433 - DNA, 23 bp, Artificial Sequence
  Description of Artificial Sequence: Synthetic oligonucleotide
gctgagctgcagccccaggaagg

SEQ ID NO: 3434 - DNA, 23 bp, Artificial Sequence
  Description of Artificial Sequence: Synthetic oligonucleotide
cccccttctctgccttcctgggg

SEQ ID NO: 3435 - DNA, 23 bp, Artificial Sequence
  Description of Artificial Sequence: Synthetic oligonucleotide
gcccccttctctgccttcctggg

SEQ ID NO: 3436 - DNA, 23 bp, Artificial Sequence
  Description of Artificial Sequence: Synthetic oligonucleotide
ggcccccttctctgccttcctgg

SEQ ID NO: 3437 - DNA, 23 bp, Artificial Sequence
  Description of Artificial Sequence: Synthetic oligonucleotide
cagccccaggaaggcagagaagg

SEQ ID NO: 3438 - DNA, 23 bp, Artificial Sequence
  Description of Artificial Sequence: Synthetic oligonucleotide
agccccaggaaggcagagaaggg

SEQ ID NO: 3439 - DNA, 23 bp, Artificial Sequence
  Description of Artificial Sequence: Synthetic oligonucleotide
gccccaggaaggcagagaagggg

SEQ ID NO: 3440 - DNA, 23 bp, Artificial Sequence
  Description of Artificial Sequence: Synthetic oligonucleotide
ccccaggaaggcagagaaggggg

SEQ ID NO: 3441 - DNA, 23 bp, Artificial Sequence
  Description of Artificial Sequence: Synthetic oligonucleotide
gggcaggcacgcacacaacttgg

SEQ ID NO: 3442 - DNA, 23 bp, Artificial Sequence
  Description of Artificial Sequence: Synthetic oligonucleotide
ttgccctaagagggaagggcagg

SEQ ID NO: 3443 - DNA, 23 bp, Artificial Sequence
  Description of Artificial Sequence: Synthetic oligonucleotide
agttttgccctaagagggaaggg

SEQ ID NO: 3444 - DNA, 23 bp, Artificial Sequence
  Description of Artificial Sequence: Synthetic oligonucleotide
gagttttgccctaagagggaagg

SEQ ID NO: 3445 - DNA, 23 bp, Artificial Sequence
  Description of Artificial Sequence: Synthetic oligonucleotide
cgtgcctgcccttccctcttagg

SEQ ID NO: 3446 - DNA, 23 bp, Artificial Sequence
  Description of Artificial Sequence: Synthetic oligonucleotide
gtgcctgcccttccctcttaggg

SEQ ID NO: 3447 - DNA, 23 bp, Artificial Sequence
  Description of Artificial Sequence: Synthetic oligonucleotide
tttggagttttgccctaagaggg

SEQ ID NO: 3448 - DNA, 23 bp, Artificial Sequence
  Description of Artificial Sequence: Synthetic oligonucleotide
gtttggagttttgccctaagagg

SEQ ID NO: 3449 - DNA, 23 bp, Artificial Sequence
  Description of Artificial Sequence: Synthetic oligonucleotide
tccagataatcaagggtgtttgg

SEQ ID NO: 3450 - DNA, 23 bp, Artificial Sequence
  Description of Artificial Sequence: Synthetic oligonucleotide
aagaagatccagataatcaaggg

SEQ ID NO: 3451 - DNA, 23 bp, Artificial Sequence
  Description of Artificial Sequence: Synthetic oligonucleotide
aaagaagatccagataatcaagg

SEQ ID NO: 3452 - DNA, 23 bp, Artificial Sequence
  Description of Artificial Sequence: Synthetic oligonucleotide
tccaaacacccttgattatctgg

SEQ ID NO: 3453 - DNA, 23 bp, Artificial Sequence
  Description of Artificial Sequence: Synthetic oligonucleotide
ttaacatctggtatcttctatgg

SEQ ID NO: 3454 - DNA, 23 bp, Artificial Sequence
  Description of Artificial Sequence: Synthetic oligonucleotide
tgccaatattccttaacatctgg

SEQ ID NO: 3455 - DNA, 23 bp, Artificial Sequence
  Description of Artificial Sequence: Synthetic oligonucleotide
atagaagataccagatgttaagg

SEQ ID NO: 3456 - DNA, 23 bp, Artificial Sequence
  Description of Artificial Sequence: Synthetic oligonucleotide
taccagatgttaaggaatattgg

SEQ ID NO: 3457 - DNA, 23 bp, Artificial Sequence
  Description of Artificial Sequence: Synthetic oligonucleotide
ggaatattggcagcttcacttgg

SEQ ID NO: 3458 - DNA, 23 bp, Artificial Sequence
  Description of Artificial Sequence: Synthetic oligonucleotide
cctccttgagtttggaaacaggg

SEQ ID NO: 3459 - DNA, 23 bp, Artificial Sequence
  Description of Artificial Sequence: Synthetic oligonucleotide
ccctccttgagtttggaaacagg

SEQ ID NO: 3460 - DNA, 23 bp, Artificial Sequence
  Description of Artificial Sequence: Synthetic oligonucleotide
aatccctgtttccaaactcaagg

SEQ ID NO: 3461 - DNA, 23 bp, Artificial Sequence
  Description of Artificial Sequence: Synthetic oligonucleotide
agcccatccctccttgagtttgg

SEQ ID NO: 3462 - DNA, 23 bp, Artificial Sequence
  Description of Artificial Sequence: Synthetic oligonucleotide
ccctgtttccaaactcaaggagg

SEQ ID NO: 3463 - DNA, 23 bp, Artificial Sequence
  Description of Artificial Sequence: Synthetic oligonucleotide
cctgtttccaaactcaaggaggg

SEQ ID NO: 3464 - DNA, 23 bp, Artificial Sequence
  Description of Artificial Sequence: Synthetic oligonucleotide
tttccaaactcaaggagggatgg

SEQ ID NO: 3465 - DNA, 23 bp, Artificial Sequence
  Description of Artificial Sequence: Synthetic oligonucleotide
ttccaaactcaaggagggatggg

SEQ ID NO: 3466 - DNA, 23 bp, Artificial Sequence
  Description of Artificial Sequence: Synthetic oligonucleotide
ctcatcactctcttcattgcagg

SEQ ID NO: 3467 - DNA, 23 bp, Artificial Sequence
  Description of Artificial Sequence: Synthetic oligonucleotide
attgcaggagcacatctctctgg

SEQ ID NO: 3468 - DNA, 23 bp, Artificial Sequence
  Description of Artificial Sequence: Synthetic oligonucleotide
tacaagaaagggtgatggttagg

SEQ ID NO: 3469 - DNA, 23 bp, Artificial Sequence
  Description of Artificial Sequence: Synthetic oligonucleotide
gcttcccaggagcatgatttagg

SEQ ID NO: 3470 - DNA, 23 bp, Artificial Sequence
  Description of Artificial Sequence: Synthetic oligonucleotide
tgggtcctaaatcatgctcctgg

SEQ ID NO: 3471 - DNA, 23 bp, Artificial Sequence
  Description of Artificial Sequence: Synthetic oligonucleotide
gggtcctaaatcatgctcctggg

SEQ ID NO: 3472 - DNA, 23 bp, Artificial Sequence
  Description of Artificial Sequence: Synthetic oligonucleotide
cccacagtaaggagcttcccagg

SEQ ID NO: 3473 - DNA, 23 bp, Artificial Sequence
  Description of Artificial Sequence: Synthetic oligonucleotide
tcctgggaagctccttactgtgg

SEQ ID NO: 3474 - DNA, 23 bp, Artificial Sequence
  Description of Artificial Sequence: Synthetic oligonucleotide
cctgggaagctccttactgtggg

SEQ ID NO: 3475 - DNA, 23 bp, Artificial Sequence
  Description of Artificial Sequence: Synthetic oligonucleotide
ctaatacaagtcccacagtaagg

SEQ ID NO: 3476 - DNA, 23 bp, Artificial Sequence
  Description of Artificial Sequence: Synthetic oligonucleotide
atgcaaactcctgcttattgagg

SEQ ID NO: 3477 - DNA, 23 bp, Artificial Sequence
  Description of Artificial Sequence: Synthetic oligonucleotide
aaaaaatgtcctcaataagcagg

SEQ ID NO: 3478 - DNA, 23 bp, Artificial Sequence
  Description of Artificial Sequence: Synthetic oligonucleotide
gcaggagtttgcatgagaactgg

SEQ ID NO: 3479 - DNA, 23 bp, Artificial Sequence
  Description of Artificial Sequence: Synthetic oligonucleotide
atgagaactggttgctgacaagg

SEQ ID NO: 3480 - DNA, 23 bp, Artificial Sequence
  Description of Artificial Sequence: Synthetic oligonucleotide
gaactggttgctgacaaggaagg

SEQ ID NO: 3481 - DNA, 23 bp, Artificial Sequence
  Description of Artificial Sequence: Synthetic oligonucleotide
acaaggaaggaaataatttctgg

SEQ ID NO: 3482 - DNA, 23 bp, Artificial Sequence
  Description of Artificial Sequence: Synthetic oligonucleotide
acaaaatgagatcctgcagaagg

SEQ ID NO: 3483 - DNA, 23 bp, Artificial Sequence
  Description of Artificial Sequence: Synthetic oligonucleotide
agagattccaatccttctgcagg

SEQ ID NO: 3484 - DNA, 23 bp, Artificial Sequence
  Description of Artificial Sequence: Synthetic oligonucleotide
atgagatcctgcagaaggattgg

SEQ ID NO: 3485 - DNA, 23 bp, Artificial Sequence
  Description of Artificial Sequence: Synthetic oligonucleotide
aggattggaatctctttttctgg

SEQ ID NO: 3486 - DNA, 23 bp, Artificial Sequence
  Description of Artificial Sequence: Synthetic oligonucleotide
attggaatctctttttctggagg

SEQ ID NO: 3487 - DNA, 23 bp, Artificial Sequence
  Description of Artificial Sequence: Synthetic oligonucleotide
attgtgtggtttattctcaaagg

SEQ ID NO: 3488 - DNA, 23 bp, Artificial Sequence
  Description of Artificial Sequence: Synthetic oligonucleotide
atacaggttggataattgtgtgg

SEQ ID NO: 3489 - DNA, 23 bp, Artificial Sequence
  Description of Artificial Sequence: Synthetic oligonucleotide
tattccttcacaatacaggttgg

SEQ ID NO: 3490 - DNA, 23 bp, Artificial Sequence
  Description of Artificial Sequence: Synthetic oligonucleotide
gacttattccttcacaatacagg

SEQ ID NO: 3491 - DNA, 23 bp, Artificial Sequence
  Description of Artificial Sequence: Synthetic oligonucleotide
ttatccaacctgtattgtgaagg

SEQ ID NO: 3492 - DNA, 23 bp, Artificial Sequence
  Description of Artificial Sequence: Synthetic oligonucleotide
gttaattcctgaattcaagaagg

SEQ ID NO: 3493 - DNA, 23 bp, Artificial Sequence
  Description of Artificial Sequence: Synthetic oligonucleotide
aataagtccttcttgaattcagg

SEQ ID NO: 3494 - DNA, 23 bp, Artificial Sequence
  Description of Artificial Sequence: Synthetic oligonucleotide
tgaattcaggaattaacacctgg

SEQ ID NO: 3495 - DNA, 23 bp, Artificial Sequence
  Description of Artificial Sequence: Synthetic oligonucleotide
gaattcaggaattaacacctggg

SEQ ID NO: 3496 - DNA, 23 bp, Artificial Sequence
  Description of Artificial Sequence: Synthetic oligonucleotide
ttcaggaattaacacctgggagg

SEQ ID NO: 3497 - DNA, 23 bp, Artificial Sequence
  Description of Artificial Sequence: Synthetic oligonucleotide
aggaattaacacctgggaggagg

SEQ ID NO: 3498 - DNA, 23 bp, Artificial Sequence
  Description of Artificial Sequence: Synthetic oligonucleotide
tgaactccatccctcctcccagg

SEQ ID NO: 3499 - DNA, 23 bp, Artificial Sequence
  Description of Artificial Sequence: Synthetic oligonucleotide
ggaattaacacctgggaggaggg

SEQ ID NO: 3500 - DNA, 23 bp, Artificial Sequence
  Description of Artificial Sequence: Synthetic oligonucleotide
ttaacacctgggaggagggatgg

SEQ ID NO: 3501 - DNA, 23 bp, Artificial Sequence
  Description of Artificial Sequence: Synthetic oligonucleotide
gggctgtattttagtttaggggg

SEQ ID NO: 3502 - DNA, 23 bp, Artificial Sequence
  Description of Artificial Sequence: Synthetic oligonucleotide
agggctgtattttagtttagggg

SEQ ID NO: 3503 - DNA, 23 bp, Artificial Sequence
  Description of Artificial Sequence: Synthetic oligonucleotide
gagggctgtattttagtttaggg

SEQ ID NO: 3504 - DNA, 23 bp, Artificial Sequence
  Description of Artificial Sequence: Synthetic oligonucleotide
ggagggctgtattttagtttagg

SEQ ID NO: 3505 - DNA, 23 bp, Artificial Sequence
  Description of Artificial Sequence: Synthetic oligonucleotide
aactaaaatacagccctccttgg

SEQ ID NO: 3506 - DNA, 23 bp, Artificial Sequence
  Description of Artificial Sequence: Synthetic oligonucleotide
ggcaccttttggaccaaggaggg

SEQ ID NO: 3507 - DNA, 23 bp, Artificial Sequence
  Description of Artificial Sequence: Synthetic oligonucleotide
aggcaccttttggaccaaggagg

SEQ ID NO: 3508 - DNA, 23 bp, Artificial Sequence
  Description of Artificial Sequence: Synthetic oligonucleotide
agaaggcaccttttggaccaagg

SEQ ID NO: 3509 - DNA, 23 bp, Artificial Sequence
  Description of Artificial Sequence: Synthetic oligonucleotide
acagccctccttggtccaaaagg

SEQ ID NO: 3510 - DNA, 23 bp, Artificial Sequence
  Description of Artificial Sequence: Synthetic oligonucleotide
agaagagagaaggcaccttttgg

SEQ ID NO: 3511 - DNA, 23 bp, Artificial Sequence
  Description of Artificial Sequence: Synthetic oligonucleotide
aagatacagcagaagagagaagg

SEQ ID NO: 3512 - DNA, 23 bp, Artificial Sequence
  Description of Artificial Sequence: Synthetic oligonucleotide
tgatttccagggtaactgttggg

SEQ ID NO: 3513 - DNA, 23 bp, Artificial Sequence
  Description of Artificial Sequence: Synthetic oligonucleotide
ttgatttccagggtaactgttgg

SEQ ID NO: 3514 - DNA, 23 bp, Artificial Sequence
  Description of Artificial Sequence: Synthetic oligonucleotide
ttcaaacccaacagttaccctgg

SEQ ID NO: 3515 - DNA, 23 bp, Artificial Sequence
  Description of Artificial Sequence: Synthetic oligonucleotide
tacttcctttttgatttccaggg

SEQ ID NO: 3516 - DNA, 23 bp, Artificial Sequence
  Description of Artificial Sequence: Synthetic oligonucleotide
gtacttcctttttgatttccagg

SEQ ID NO: 3517 - DNA, 23 bp, Artificial Sequence
  Description of Artificial Sequence: Synthetic oligonucleotide
agttaccctggaaatcaaaaagg

SEQ ID NO: 3518 - DNA, 23 bp, Artificial Sequence
  Description of Artificial Sequence: Synthetic oligonucleotide
aactcaacatagctcttgcctgg

SEQ ID NO: 3519 - DNA, 23 bp, Artificial Sequence
  Description of Artificial Sequence: Synthetic oligonucleotide
actcaacatagctcttgcctggg

SEQ ID NO: 3520 - DNA, 23 bp, Artificial Sequence
  Description of Artificial Sequence: Synthetic oligonucleotide
aaatggtgctggttggtcccagg

SEQ ID NO: 3521 - DNA, 23 bp, Artificial Sequence
  Description of Artificial Sequence: Synthetic oligonucleotide
tttagccaaatggtgctggttgg

SEQ ID NO: 3522 - DNA, 23 bp, Artificial Sequence
  Description of Artificial Sequence: Synthetic oligonucleotide
catctttagccaaatggtgctgg

SEQ ID NO: 3523 - DNA, 23 bp, Artificial Sequence
  Description of Artificial Sequence: Synthetic oligonucleotide
tgggaccaaccagcaccatttgg

SEQ ID NO: 3524 - DNA, 23 bp, Artificial Sequence
  Description of Artificial Sequence: Synthetic oligonucleotide
gataaccatctttagccaaatgg

SEQ ID NO: 3525 - DNA, 23 bp, Artificial Sequence
  Description of Artificial Sequence: Synthetic oligonucleotide
cagcaccatttggctaaagatgg

SEQ ID NO: 3526 - DNA, 23 bp, Artificial Sequence
  Description of Artificial Sequence: Synthetic oligonucleotide
taaacaaagaaataaataaatgg

SEQ ID NO: 3527 - DNA, 23 bp, Artificial Sequence
  Description of Artificial Sequence: Synthetic oligonucleotide
aaacaaagaaataaataaatggg

SEQ ID NO: 3528 - DNA, 23 bp, Artificial Sequence
  Description of Artificial Sequence: Synthetic oligonucleotide
atttatttcaacattgtcaatgg

SEQ ID NO: 3529 - DNA, 23 bp, Artificial Sequence
  Description of Artificial Sequence: Synthetic oligonucleotide
gagaatatcagttacacatgagg

SEQ ID NO: 3530 - DNA, 23 bp, Artificial Sequence
  Description of Artificial Sequence: Synthetic oligonucleotide
tgtaactgatattctcattatgg

SEQ ID NO: 3531 - DNA, 23 bp, Artificial Sequence
  Description of Artificial Sequence: Synthetic oligonucleotide
gtaactgatattctcattatggg

SEQ ID NO: 3532 - DNA, 23 bp, Artificial Sequence
  Description of Artificial Sequence: Synthetic oligonucleotide
gccccaataaagtcacacagagg

SEQ ID NO: 3533 - DNA, 23 bp, Artificial Sequence
  Description of Artificial Sequence: Synthetic oligonucleotide
ggacctctgtgtgactttattgg

SEQ ID NO: 3534 - DNA, 23 bp, Artificial Sequence
  Description of Artificial Sequence: Synthetic oligonucleotide
gacctctgtgtgactttattggg

SEQ ID NO: 3535 - DNA, 23 bp, Artificial Sequence
  Description of Artificial Sequence: Synthetic oligonucleotide
acctctgtgtgactttattgggg

SEQ ID NO: 3536 - DNA, 23 bp, Artificial Sequence
  Description of Artificial Sequence: Synthetic oligonucleotide
taaggaaagaacggttagagagg

SEQ ID NO: 3537 - DNA, 23 bp, Artificial Sequence
  Description of Artificial Sequence: Synthetic oligonucleotide
ggtcttccttaaggaaagaacgg

SEQ ID NO: 3538 - DNA, 23 bp, Artificial Sequence
  Description of Artificial Sequence: Synthetic oligonucleotide
ctctaaccgttctttccttaagg

SEQ ID NO: 3539 - DNA, 23 bp, Artificial Sequence
  Description of Artificial Sequence: Synthetic oligonucleotide
acaataaatggtcttccttaagg

SEQ ID NO: 3540 - DNA, 23 bp, Artificial Sequence
  Description of Artificial Sequence: Synthetic oligonucleotide
ccaggaaataaaacaataaatgg

SEQ ID NO: 3541 - DNA, 23 bp, Artificial Sequence
  Description of Artificial Sequence: Synthetic oligonucleotide
ccatttattgttttatttcctgg

SEQ ID NO: 3542 - DNA, 23 bp, Artificial Sequence
  Description of Artificial Sequence: Synthetic oligonucleotide
taaaatgatgtattttctccagg

SEQ ID NO: 3543 - DNA, 23 bp, Artificial Sequence
  Description of Artificial Sequence: Synthetic oligonucleotide
tgggatgggttattaaggctggg

SEQ ID NO: 3544 - DNA, 23 bp, Artificial Sequence
  Description of Artificial Sequence: Synthetic oligonucleotide
ctgggatgggttattaaggctgg

SEQ ID NO: 3545 - DNA, 23 bp, Artificial Sequence
  Description of Artificial Sequence: Synthetic oligonucleotide
tacactgggatgggttattaagg

SEQ ID NO: 3546 - DNA, 23 bp, Artificial Sequence
  Description of Artificial Sequence: Synthetic oligonucleotide
gaaggagtatacactgggatggg

SEQ ID NO: 3547 - DNA, 23 bp, Artificial Sequence
  Description of Artificial Sequence: Synthetic oligonucleotide
tgaaggagtatacactgggatgg

SEQ ID NO: 3548 - DNA, 23 bp, Artificial Sequence
  Description of Artificial Sequence: Synthetic oligonucleotide
aagatgaaggagtatacactggg

SEQ ID NO: 3549 - DNA, 23 bp, Artificial Sequence
  Description of Artificial Sequence: Synthetic oligonucleotide
gaagatgaaggagtatacactgg

SEQ ID NO: 3550 - DNA, 23 bp, Artificial Sequence
  Description of Artificial Sequence: Synthetic oligonucleotide
gtcattatccatgaagatgaagg

SEQ ID NO: 3551 - DNA, 23 bp, Artificial Sequence
  Description of Artificial Sequence: Synthetic oligonucleotide
tgtatactccttcatcttcatgg

SEQ ID NO: 3552 - DNA, 23 bp, Artificial Sequence
  Description of Artificial Sequence: Synthetic oligonucleotide
tttgttcagagcatgtagcaggg

SEQ ID NO: 3553 - DNA, 23 bp, Artificial Sequence
  Description of Artificial Sequence: Synthetic oligonucleotide
atttgttcagagcatgtagcagg

SEQ ID NO: 3554 - DNA, 23 bp, Artificial Sequence
  Description of Artificial Sequence: Synthetic oligonucleotide
ctacatgctctgaacaaatcagg

SEQ ID NO: 3555 - DNA, 23 bp, Artificial Sequence
  Description of Artificial Sequence: Synthetic oligonucleotide
catgctctgaacaaatcaggagg

SEQ ID NO: 3556 - DNA, 23 bp, Artificial Sequence
  Description of Artificial Sequence: Synthetic oligonucleotide
acaaatcaggaggcccctcgtgg

SEQ ID NO: 3557 - DNA, 23 bp, Artificial Sequence
  Description of Artificial Sequence: Synthetic oligonucleotide
actggttatacttccacgagggg

SEQ ID NO: 3558 - DNA, 23 bp, Artificial Sequence
  Description of Artificial Sequence: Synthetic oligonucleotide
gactggttatacttccacgaggg

SEQ ID NO: 3559 - DNA, 23 bp, Artificial Sequence
  Description of Artificial Sequence: Synthetic oligonucleotide
ggactggttatacttccacgagg

SEQ ID NO: 3560 - DNA, 23 bp, Artificial Sequence
  Description of Artificial Sequence: Synthetic oligonucleotide
gggacagagaaagaaaggactgg

SEQ ID NO: 3561 - DNA, 23 bp, Artificial Sequence
  Description of Artificial Sequence: Synthetic oligonucleotide
gaagagggacagagaaagaaagg

SEQ ID NO: 3562 - DNA, 23 bp, Artificial Sequence
  Description of Artificial Sequence: Synthetic oligonucleotide
gcagaagctccacccggggatgg

SEQ ID NO: 3563 - DNA, 23 bp, Artificial Sequence
  Description of Artificial Sequence: Synthetic oligonucleotide
taattagttccatccccgggtgg

SEQ ID NO: 3564 - DNA, 23 bp, Artificial Sequence
  Description of Artificial Sequence: Synthetic oligonucleotide
ctgggcagaagctccacccgggg

SEQ ID NO: 3565 - DNA, 23 bp, Artificial Sequence
  Description of Artificial Sequence: Synthetic oligonucleotide
actgggcagaagctccacccggg

SEQ ID NO: 3566 - DNA, 23 bp, Artificial Sequence
  Description of Artificial Sequence: Synthetic oligonucleotide
cactgggcagaagctccacccgg

SEQ ID NO: 3567 - DNA, 23 bp, Artificial Sequence
  Description of Artificial Sequence: Synthetic oligonucleotide
cgggtggagcttctgcccagtgg

SEQ ID NO: 3568 - DNA, 23 bp, Artificial Sequence
  Description of Artificial Sequence: Synthetic oligonucleotide
cccactccagcatgaccactggg

SEQ ID NO: 3569 - DNA, 23 bp, Artificial Sequence
  Description of Artificial Sequence: Synthetic oligonucleotide
tcccactccagcatgaccactgg

SEQ ID NO: 3570 - DNA, 23 bp, Artificial Sequence
  Description of Artificial Sequence: Synthetic oligonucleotide
cttctgcccagtggtcatgctgg

SEQ ID NO: 3571 - DNA, 23 bp, Artificial Sequence
  Description of Artificial Sequence: Synthetic oligonucleotide
gcccagtggtcatgctggagtgg

SEQ ID NO: 3572 - DNA, 23 bp, Artificial Sequence
  Description of Artificial Sequence: Synthetic oligonucleotide
cccagtggtcatgctggagtggg

SEQ ID NO: 3573 - DNA, 23 bp, Artificial Sequence
  Description of Artificial Sequence: Synthetic oligonucleotide
ggtcatgctggagtgggatgtgg

SEQ ID NO: 3574 - DNA, 23 bp, Artificial Sequence
  Description of Artificial Sequence: Synthetic oligonucleotide
gtcatgctggagtgggatgtggg

SEQ ID NO: 3575 - DNA, 23 bp, Artificial Sequence
  Description of Artificial Sequence: Synthetic oligonucleotide
tcatgctggagtgggatgtgggg

SEQ ID NO: 3576 - DNA, 23 bp, Artificial Sequence
  Description of Artificial Sequence: Synthetic oligonucleotide
gaaagcttgacaaatagctgggg

SEQ ID NO: 3577 - DNA, 23 bp, Artificial Sequence
  Description of Artificial Sequence: Synthetic oligonucleotide
agaaagcttgacaaatagctggg

SEQ ID NO: 3578 - DNA, 23 bp, Artificial Sequence
  Description of Artificial Sequence: Synthetic oligonucleotide
aagaaagcttgacaaatagctgg

SEQ ID NO: 3579 - DNA, 23 bp, Artificial Sequence
  Description of Artificial Sequence: Synthetic oligonucleotide
tgtcaagctttcttctaccttgg

SEQ ID NO: 3580 - DNA, 23 bp, Artificial Sequence
  Description of Artificial Sequence: Synthetic oligonucleotide
gtcaagctttcttctaccttggg

SEQ ID NO: 3581 - DNA, 23 bp, Artificial Sequence
  Description of Artificial Sequence: Synthetic oligonucleotide
tcaagctttcttctaccttgggg

SEQ ID NO: 3582 - DNA, 23 bp, Artificial Sequence
  Description of Artificial Sequence: Synthetic oligonucleotide
tagtgttaattgaatccccaagg

SEQ ID NO: 3583 - DNA, 23 bp, Artificial Sequence
  Description of Artificial Sequence: Synthetic oligonucleotide
ttccccatcccaagtctggaagg

SEQ ID NO: 3584 - DNA, 23 bp, Artificial Sequence
  Description of Artificial Sequence: Synthetic oligonucleotide
ctgctgcgaccttccagacttgg

SEQ ID NO: 3585 - DNA, 23 bp, Artificial Sequence
  Description of Artificial Sequence: Synthetic oligonucleotide
tgctgcgaccttccagacttggg

SEQ ID NO: 3586 - DNA, 23 bp, Artificial Sequence
  Description of Artificial Sequence: Synthetic oligonucleotide
ccttttccccatcccaagtctgg

SEQ ID NO: 3587 - DNA, 23 bp, Artificial Sequence
  Description of Artificial Sequence: Synthetic oligonucleotide
gcgaccttccagacttgggatgg

SEQ ID NO: 3588 - DNA, 23 bp, Artificial Sequence
  Description of Artificial Sequence: Synthetic oligonucleotide
cgaccttccagacttgggatggg

SEQ ID NO: 3589 - DNA, 23 bp, Artificial Sequence
  Description of Artificial Sequence: Synthetic oligonucleotide
gaccttccagacttgggatgggg

SEQ ID NO: 3590 - DNA, 23 bp, Artificial Sequence
  Description of Artificial Sequence: Synthetic oligonucleotide
ccagacttgggatggggaaaagg

SEQ ID NO: 3591 - DNA, 23 bp, Artificial Sequence
  Description of Artificial Sequence: Synthetic oligonucleotide
cttgggatggggaaaaggcaagg

SEQ ID NO: 3592 - DNA, 23 bp, Artificial Sequence
  Description of Artificial Sequence: Synthetic oligonucleotide
ttgggatggggaaaaggcaaggg

SEQ ID NO: 3593 - DNA, 23 bp, Artificial Sequence
  Description of Artificial Sequence: Synthetic oligonucleotide
cttcccaatgtaagctttcaagg

SEQ ID NO: 3594 - DNA, 23 bp, Artificial Sequence
  Description of Artificial Sequence: Synthetic oligonucleotide
gtcgccttgaaagcttacattgg

SEQ ID NO: 3595 - DNA, 23 bp, Artificial Sequence
  Description of Artificial Sequence: Synthetic oligonucleotide
tcgccttgaaagcttacattggg

SEQ ID NO: 3596 - DNA, 23 bp, Artificial Sequence
  Description of Artificial Sequence: Synthetic oligonucleotide
gaaagcttacattgggaagaagg

SEQ ID NO: 3597 - DNA, 23 bp, Artificial Sequence
  Description of Artificial Sequence: Synthetic oligonucleotide
aaagcttacattgggaagaaggg

SEQ ID NO: 3598 - DNA, 23 bp, Artificial Sequence
  Description of Artificial Sequence: Synthetic oligonucleotide
gagtgtaatcttcacatgcatgg

SEQ ID NO: 3599 - DNA, 23 bp, Artificial Sequence
  Description of Artificial Sequence: Synthetic oligonucleotide
agtgtaatcttcacatgcatggg

SEQ ID NO: 3600 - DNA, 23 bp, Artificial Sequence
  Description of Artificial Sequence: Synthetic oligonucleotide
tcttcacatgcatgggaagcagg

SEQ ID NO: 3601 - DNA, 23 bp, Artificial Sequence
  Description of Artificial Sequence: Synthetic oligonucleotide
cttcacatgcatgggaagcaggg

SEQ ID NO: 3602 - DNA, 23 bp, Artificial Sequence
  Description of Artificial Sequence: Synthetic oligonucleotide
cacatgcatgggaagcagggagg

SEQ ID NO: 3603 - DNA, 23 bp, Artificial Sequence
  Description of Artificial Sequence: Synthetic oligonucleotide
acatgcatgggaagcagggaggg

SEQ ID NO: 3604 - DNA, 23 bp, Artificial Sequence
  Description of Artificial Sequence: Synthetic oligonucleotide
catgcatgggaagcagggagggg

SEQ ID NO: 3605 - DNA, 23 bp, Artificial Sequence
  Description of Artificial Sequence: Synthetic oligonucleotide
atgcatgggaagcagggaggggg

SEQ ID NO: 3606 - DNA, 23 bp, Artificial Sequence
  Description of Artificial Sequence: Synthetic oligonucleotide
tgcatgggaagcagggagggggg

SEQ ID NO: 3607 - DNA, 23 bp, Artificial Sequence
  Description of Artificial Sequence: Synthetic oligonucleotide
atttttatgactgaagtgcaagg

SEQ ID NO: 3608 - DNA, 23 bp, Artificial Sequence
  Description of Artificial Sequence: Synthetic oligonucleotide
cttggagctttacaatgagaggg

SEQ ID NO: 3609 - DNA, 23 bp, Artificial Sequence
  Description of Artificial Sequence: Synthetic oligonucleotide
acttggagctttacaatgagagg

SEQ ID NO: 3610 - DNA, 23 bp, Artificial Sequence
  Description of Artificial Sequence: Synthetic oligonucleotide
ctatgtgctcttggctcacttgg

SEQ ID NO: 3611 - DNA, 23 bp, Artificial Sequence
  Description of Artificial Sequence: Synthetic oligonucleotide
cactgtaaactatgtgctcttgg

SEQ ID NO: 3612 - DNA, 23 bp, Artificial Sequence
  Description of Artificial Sequence: Synthetic oligonucleotide
gatactgcgcagagagtgagagg

SEQ ID NO: 3613 - DNA, 23 bp, Artificial Sequence
  Description of Artificial Sequence: Synthetic oligonucleotide
gcaagaaaacaaactcacaaggg

SEQ ID NO: 3614 - DNA, 23 bp, Artificial Sequence
  Description of Artificial Sequence: Synthetic oligonucleotide
ggcaagaaaacaaactcacaagg

SEQ ID NO: 3615 - DNA, 23 bp, Artificial Sequence
  Description of Artificial Sequence: Synthetic oligonucleotide
tgtgagtttgttttcttgcccgg

SEQ ID NO: 3616 - DNA, 23 bp, Artificial Sequence
  Description of Artificial Sequence: Synthetic oligonucleotide
agtcagaaatggagatagccggg

SEQ ID NO: 3617 - DNA, 23 bp, Artificial Sequence
  Description of Artificial Sequence: Synthetic oligonucleotide
aagtcagaaatggagatagccgg

SEQ ID NO: 3618 - DNA, 23 bp, Artificial Sequence
  Description of Artificial Sequence: Synthetic oligonucleotide
gtgaatgagcaagtcagaaatgg

SEQ ID NO: 3619 - DNA, 23 bp, Artificial Sequence
  Description of Artificial Sequence: Synthetic oligonucleotide
tctgacttgctcattcaccttgg

SEQ ID NO: 3620 - DNA, 23 bp, Artificial Sequence
  Description of Artificial Sequence: Synthetic oligonucleotide
ctgacttgctcattcaccttggg

SEQ ID NO: 3621 - DNA, 23 bp, Artificial Sequence
  Description of Artificial Sequence: Synthetic oligonucleotide
tgacttgctcattcaccttgggg

SEQ ID NO: 3622 - DNA, 23 bp, Artificial Sequence
  Description of Artificial Sequence: Synthetic oligonucleotide
ttcaatatgacagcaccccaagg

SEQ ID NO: 3623 - DNA, 23 bp, Artificial Sequence
  Description of Artificial Sequence: Synthetic oligonucleotide
ggtggctgaagtcagtgacaggg

SEQ ID NO: 3624 - DNA, 23 bp, Artificial Sequence
  Description of Artificial Sequence: Synthetic oligonucleotide
aggtggctgaagtcagtgacagg

SEQ ID NO: 3625 - DNA, 23 bp, Artificial Sequence
  Description of Artificial Sequence: Synthetic oligonucleotide
tctccaagcccttgtgcaggtgg

SEQ ID NO: 3626 - DNA, 23 bp, Artificial Sequence
  Description of Artificial Sequence: Synthetic oligonucleotide
tgacttcagccacctgcacaagg

SEQ ID NO: 3627 - DNA, 23 bp, Artificial Sequence
  Description of Artificial Sequence: Synthetic oligonucleotide
gacttcagccacctgcacaaggg

SEQ ID NO: 3628 - DNA, 23 bp, Artificial Sequence
  Description of Artificial Sequence: Synthetic oligonucleotide
tggtctccaagcccttgtgcagg

SEQ ID NO: 3629 - DNA, 23 bp, Artificial Sequence
  Description of Artificial Sequence: Synthetic oligonucleotide
cagccacctgcacaagggcttgg

SEQ ID NO: 3630 - DNA, 23 bp, Artificial Sequence
  Description of Artificial Sequence: Synthetic oligonucleotide
tctgggagggcagaggggtgtgg

SEQ ID NO: 3631 - DNA, 23 bp, Artificial Sequence
  Description of Artificial Sequence: Synthetic oligonucleotide
atgattctgggagggcagagggg

SEQ ID NO: 3632 - DNA, 23 bp, Artificial Sequence
  Description of Artificial Sequence: Synthetic oligonucleotide
tatgattctgggagggcagaggg

SEQ ID NO: 3633 - DNA, 23 bp, Artificial Sequence
  Description of Artificial Sequence: Synthetic oligonucleotide
atatgattctgggagggcagagg

SEQ ID NO: 3634 - DNA, 23 bp, Artificial Sequence
  Description of Artificial Sequence: Synthetic oligonucleotide
ccagggatatgattctgggaggg

SEQ ID NO: 3635 - DNA, 23 bp, Artificial Sequence
  Description of Artificial Sequence: Synthetic oligonucleotide
tccagggatatgattctgggagg

SEQ ID NO: 3636 - DNA, 23 bp, Artificial Sequence
  Description of Artificial Sequence: Synthetic oligonucleotide
gcctccagggatatgattctggg

SEQ ID NO: 3637 - DNA, 23 bp, Artificial Sequence
  Description of Artificial Sequence: Synthetic oligonucleotide
agcctccagggatatgattctgg

SEQ ID NO: 3638 - DNA, 23 bp, Artificial Sequence
  Description of Artificial Sequence: Synthetic oligonucleotide
ccctcccagaatcatatccctgg

SEQ ID NO: 3639 - DNA, 23 bp, Artificial Sequence
  Description of Artificial Sequence: Synthetic oligonucleotide
tcccagaatcatatccctggagg

SEQ ID NO: 3640 - DNA, 23 bp, Artificial Sequence
  Description of Artificial Sequence: Synthetic oligonucleotide
agagactagctgagcctccaggg

SEQ ID NO: 3641 - DNA, 23 bp, Artificial Sequence
  Description of Artificial Sequence: Synthetic oligonucleotide
cagagactagctgagcctccagg

SEQ ID NO: 3642 - DNA, 23 bp, Artificial Sequence
  Description of Artificial Sequence: Synthetic oligonucleotide
ctggaggctcagctagtctctgg

SEQ ID NO: 3643 - DNA, 23 bp, Artificial Sequence
  Description of Artificial Sequence: Synthetic oligonucleotide
tggaggctcagctagtctctggg

SEQ ID NO: 3644 - DNA, 23 bp, Artificial Sequence
  Description of Artificial Sequence: Synthetic oligonucleotide
gaaaagaaagggcagaggtatgg

SEQ ID NO: 3645 - DNA, 23 bp, Artificial Sequence
  Description of Artificial Sequence: Synthetic oligonucleotide
ggagggaaaagaaagggcagagg

SEQ ID NO: 3646 - DNA, 23 bp, Artificial Sequence
  Description of Artificial Sequence: Synthetic oligonucleotide
gagaaaggagggaaaagaaaggg

SEQ ID NO: 3647 - DNA, 23 bp, Artificial Sequence
  Description of Artificial Sequence: Synthetic oligonucleotide
ggagaaaggagggaaaagaaagg

SEQ ID NO: 3648 - DNA, 23 bp, Artificial Sequence
  Description of Artificial Sequence: Synthetic oligonucleotide
agaggccacaggagaaaggaggg

SEQ ID NO: 3649 - DNA, 23 bp, Artificial Sequence
  Description of Artificial Sequence: Synthetic oligonucleotide
cagaggccacaggagaaaggagg

SEQ ID NO: 3650 - DNA, 23 bp, Artificial Sequence
  Description of Artificial Sequence: Synthetic oligonucleotide
cgtcagaggccacaggagaaagg

SEQ ID NO: 3651 - DNA, 23 bp, Artificial Sequence
  Description of Artificial Sequence: Synthetic oligonucleotide
cttttccctcctttctcctgtgg

SEQ ID NO: 3652 - DNA, 23 bp, Artificial Sequence
  Description of Artificial Sequence: Synthetic oligonucleotide
ggccagacgtcagaggccacagg

SEQ ID NO: 3653 - DNA, 23 bp, Artificial Sequence
  Description of Artificial Sequence: Synthetic oligonucleotide
gttaaatggccagacgtcagagg

SEQ ID NO: 3654 - DNA, 23 bp, Artificial Sequence
  Description of Artificial Sequence: Synthetic oligonucleotide
ctcctgtggcctctgacgtctgg

SEQ ID NO: 3655 - DNA, 23 bp, Artificial Sequence
  Description of Artificial Sequence: Synthetic oligonucleotide
aaatgctaagctctgttaaatgg

SEQ ID NO: 3656 - DNA, 23 bp, Artificial Sequence
  Description of Artificial Sequence: Synthetic oligonucleotide
acagagcttagcatttttgctgg

SEQ ID NO: 3657 - DNA, 23 bp, Artificial Sequence
  Description of Artificial Sequence: Synthetic oligonucleotide
cagagcttagcatttttgctggg

SEQ ID NO: 3658 - DNA, 23 bp, Artificial Sequence
  Description of Artificial Sequence: Synthetic oligonucleotide
agcttagcatttttgctgggtgg

SEQ ID NO: 3659 - DNA, 23 bp, Artificial Sequence
  Description of Artificial Sequence: Synthetic oligonucleotide
ttttgctgggtggagagagctgg

SEQ ID NO: 3660 - DNA, 23 bp, Artificial Sequence
  Description of Artificial Sequence: Synthetic oligonucleotide
gggtggagagagctggagcctgg

SEQ ID NO: 3661 - DNA, 23 bp, Artificial Sequence
  Description of Artificial Sequence: Synthetic oligonucleotide
cacaaagagggagtgattccagg

SEQ ID NO: 3662 - DNA, 23 bp, Artificial Sequence
  Description of Artificial Sequence: Synthetic oligonucleotide
gccctccgtatgcacaaagaggg

SEQ ID NO: 3663 - DNA, 23 bp, Artificial Sequence
  Description of Artificial Sequence: Synthetic oligonucleotide
tgccctccgtatgcacaaagagg

SEQ ID NO: 3664 - DNA, 23 bp, Artificial Sequence
  Description of Artificial Sequence: Synthetic oligonucleotide
tcactccctctttgtgcatacgg

SEQ ID NO: 3665 - DNA, 23 bp, Artificial Sequence
  Description of Artificial Sequence: Synthetic oligonucleotide
ctccctctttgtgcatacggagg

SEQ ID NO: 3666 - DNA, 23 bp, Artificial Sequence
  Description of Artificial Sequence: Synthetic oligonucleotide
tccctctttgtgcatacggaggg

SEQ ID NO: 3667 - DNA, 23 bp, Artificial Sequence
  Description of Artificial Sequence: Synthetic oligonucleotide
tacggagggcatgaaaaccaagg

SEQ ID NO: 3668 - DNA, 23 bp, Artificial Sequence
  Description of Artificial Sequence: Synthetic oligonucleotide
ccactggaatgcacacaccttgg

SEQ ID NO: 3669 - DNA, 23 bp, Artificial Sequence
  Description of Artificial Sequence: Synthetic oligonucleotide
ccaaggtgtgtgcattccagtgg

SEQ ID NO: 3670 - DNA, 23 bp, Artificial Sequence
  Description of Artificial Sequence: Synthetic oligonucleotide
gtgtgtgcattccagtggcctgg

SEQ ID NO: 3671 - DNA, 23 bp, Artificial Sequence
  Description of Artificial Sequence: Synthetic oligonucleotide
gatagtagagtccaggccactgg

SEQ ID NO: 3672 - DNA, 23 bp, Artificial Sequence
  Description of Artificial Sequence: Synthetic oligonucleotide
cactgaggatagtagagtccagg

SEQ ID NO: 3673 - DNA, 23 bp, Artificial Sequence
  Description of Artificial Sequence: Synthetic oligonucleotide
ctggactctactatcctcagtgg

SEQ ID NO: 3674 - DNA, 23 bp, Artificial Sequence
  Description of Artificial Sequence: Synthetic oligonucleotide
ccttaaatacctcaccactgagg

SEQ ID NO: 3675 - DNA, 23 bp, Artificial Sequence
  Description of Artificial Sequence: Synthetic oligonucleotide
ctctactatcctcagtggtgagg

SEQ ID NO: 3676 - DNA, 23 bp, Artificial Sequence
  Description of Artificial Sequence: Synthetic oligonucleotide
cctcagtggtgaggtatttaagg

SEQ ID NO: 3677 - DNA, 23 bp, Artificial Sequence
  Description of Artificial Sequence: Synthetic oligonucleotide
aaatacctcaccacgctgagagg

SEQ ID NO: 3678 - DNA, 23 bp, Artificial Sequence
  Description of Artificial Sequence: Synthetic oligonucleotide
aaggaaaatacctctcagcgtgg

SEQ ID NO: 3679 - DNA, 23 bp, Artificial Sequence
  Description of Artificial Sequence: Synthetic oligonucleotide
aaatacctctcagcgtggtgagg

SEQ ID NO: 3680 - DNA, 23 bp, Artificial Sequence
  Description of Artificial Sequence: Synthetic oligonucleotide
tcagcgtggtgaggtatttaagg

SEQ ID NO: 3681 - DNA, 23 bp, Artificial Sequence
  Description of Artificial Sequence: Synthetic oligonucleotide
taaggaaaatacctgttgacagg

SEQ ID NO: 3682 - DNA, 23 bp, Artificial Sequence
  Description of Artificial Sequence: Synthetic oligonucleotide
agaaaatgtcacctgtcaacagg

SEQ ID NO: 3683 - DNA, 23 bp, Artificial Sequence
  Description of Artificial Sequence: Synthetic oligonucleotide
atggagacgtgtacttaagttgg

SEQ ID NO: 3684 - DNA, 23 bp, Artificial Sequence
  Description of Artificial Sequence: Synthetic oligonucleotide
ggatcactactttagaaaaatgg

SEQ ID NO: 3685 - DNA, 23 bp, Artificial Sequence
  Description of Artificial Sequence: Synthetic oligonucleotide
ttctaaagtagtgatccctcagg

SEQ ID NO: 3686 - DNA, 23 bp, Artificial Sequence
  Description of Artificial Sequence: Synthetic oligonucleotide
tctaaagtagtgatccctcaggg

SEQ ID NO: 3687 - DNA, 23 bp, Artificial Sequence
  Description of Artificial Sequence: Synthetic oligonucleotide
gtttgctgctggggccctgaggg

SEQ ID NO: 3688 - DNA, 23 bp, Artificial Sequence
  Description of Artificial Sequence: Synthetic oligonucleotide
tgtttgctgctggggccctgagg

SEQ ID NO: 3689 - DNA, 23 bp, Artificial Sequence
  Description of Artificial Sequence: Synthetic oligonucleotide
gtgccaactgtttgctgctgggg

SEQ ID NO: 3690 - DNA, 23 bp, Artificial Sequence
  Description of Artificial Sequence: Synthetic oligonucleotide
tgtgccaactgtttgctgctggg

SEQ ID NO: 3691 - DNA, 23 bp, Artificial Sequence
  Description of Artificial Sequence: Synthetic oligonucleotide
atgtgccaactgtttgctgctgg

SEQ ID NO: 3692 - DNA, 23 bp, Artificial Sequence
  Description of Artificial Sequence: Synthetic oligonucleotide
gggccccagcagcaaacagttgg

SEQ ID NO: 3693 - DNA, 23 bp, Artificial Sequence
  Description of Artificial Sequence: Synthetic oligonucleotide
agcaaacagttggcacatcaagg

SEQ ID NO: 3694 - DNA, 23 bp, Artificial Sequence
  Description of Artificial Sequence: Synthetic oligonucleotide
cacatcaaggattgacttgaagg

SEQ ID NO: 3695 - DNA, 23 bp, Artificial Sequence
  Description of Artificial Sequence: Synthetic oligonucleotide
acatcaaggattgacttgaaggg

SEQ ID NO: 3696 - DNA, 23 bp, Artificial Sequence
  Description of Artificial Sequence: Synthetic oligonucleotide
caagactattagtgaaagagtgg

SEQ ID NO: 3697 - DNA, 23 bp, Artificial Sequence
  Description of Artificial Sequence: Synthetic oligonucleotide
aagactattagtgaaagagtggg

SEQ ID NO: 3698 - DNA, 23 bp, Artificial Sequence
  Description of Artificial Sequence: Synthetic oligonucleotide
actattagtgaaagagtgggcgg

SEQ ID NO: 3699 - DNA, 23 bp, Artificial Sequence
  Description of Artificial Sequence: Synthetic oligonucleotide
ctattagtgaaagagtgggcggg

SEQ ID NO: 3700 - DNA, 23 bp, Artificial Sequence
  Description of Artificial Sequence: Synthetic oligonucleotide
gaaagagtgggcgggactaaagg

SEQ ID NO: 3701 - DNA, 23 bp, Artificial Sequence
  Description of Artificial Sequence: Synthetic oligonucleotide
gggactaaaggaactagcaaagg

SEQ ID NO: 3702 - DNA, 23 bp, Artificial Sequence
  Description of Artificial Sequence: Synthetic oligonucleotide
aaaggaactagcaaaggatgagg

SEQ ID NO: 3703 - DNA, 23 bp, Artificial Sequence
  Description of Artificial Sequence: Synthetic oligonucleotide
agcaaaggatgaggccaaccagg

SEQ ID NO: 3704 - DNA, 23 bp, Artificial Sequence
  Description of Artificial Sequence: Synthetic oligonucleotide
gcaaaggatgaggccaaccaggg

SEQ ID NO: 3705 - DNA, 23 bp, Artificial Sequence
  Description of Artificial Sequence: Synthetic oligonucleotide
cagggttgctagtccctggttgg

SEQ ID NO: 3706 - DNA, 23 bp, Artificial Sequence
  Description of Artificial Sequence: Synthetic oligonucleotide
ttcccagggttgctagtccctgg

SEQ ID NO: 3707 - DNA, 23 bp, Artificial Sequence
  Description of Artificial Sequence: Synthetic oligonucleotide
caaccagggactagcaaccctgg

SEQ ID NO: 3708 - DNA, 23 bp, Artificial Sequence
  Description of Artificial Sequence: Synthetic oligonucleotide
aaccagggactagcaaccctggg

SEQ ID NO: 3709 - DNA, 23 bp, Artificial Sequence
  Description of Artificial Sequence: Synthetic oligonucleotide
ggggtagtaaaggcttcccaggg

SEQ ID NO: 3710 - DNA, 23 bp, Artificial Sequence
  Description of Artificial Sequence: Synthetic oligonucleotide
aggggtagtaaaggcttcccagg

SEQ ID NO: 3711 - DNA, 23 bp, Artificial Sequence
  Description of Artificial Sequence: Synthetic oligonucleotide
cccaggcctaggggtagtaaagg

SEQ ID NO: 3712 - DNA, 23 bp, Artificial Sequence
  Description of Artificial Sequence: Synthetic oligonucleotide
gggaagcctttactacccctagg

SEQ ID NO: 3713 - DNA, 23 bp, Artificial Sequence
  Description of Artificial Sequence: Synthetic oligonucleotide
tcccattcccccaggcctagggg

SEQ ID NO: 3714 - DNA, 23 bp, Artificial Sequence
  Description of Artificial Sequence: Synthetic oligonucleotide
gcctttactacccctaggcctgg

SEQ ID NO: 3715 - DNA, 23 bp, Artificial Sequence
  Description of Artificial Sequence: Synthetic oligonucleotide
ctcccattcccccaggcctaggg

SEQ ID NO: 3716 - DNA, 23 bp, Artificial Sequence
  Description of Artificial Sequence: Synthetic oligonucleotide
cctttactacccctaggcctggg

SEQ ID NO: 3717 - DNA, 23 bp, Artificial Sequence
  Description of Artificial Sequence: Synthetic oligonucleotide
cctcccattcccccaggcctagg

SEQ ID NO: 3718 - DNA, 23 bp, Artificial Sequence
  Description of Artificial Sequence: Synthetic oligonucleotide
ctttactacccctaggcctgggg

SEQ ID NO: 3719 - DNA, 23 bp, Artificial Sequence
  Description of Artificial Sequence: Synthetic oligonucleotide
tttactacccctaggcctggggg

SEQ ID NO: 3720 - DNA, 23 bp, Artificial Sequence
  Description of Artificial Sequence: Synthetic oligonucleotide
tctcatcctcccattcccccagg

SEQ ID NO: 3721 - DNA, 23 bp, Artificial Sequence
  Description of Artificial Sequence: Synthetic oligonucleotide
tacccctaggcctgggggaatgg

SEQ ID NO: 3722 - DNA, 23 bp, Artificial Sequence
  Description of Artificial Sequence: Synthetic oligonucleotide
acccctaggcctgggggaatggg

SEQ ID NO: 3723 - DNA, 23 bp, Artificial Sequence
  Description of Artificial Sequence: Synthetic oligonucleotide
cctaggcctgggggaatgggagg

SEQ ID NO: 3724 - DNA, 23 bp, Artificial Sequence
  Description of Artificial Sequence: Synthetic oligonucleotide
gggaatgggaggatgagagcagg

SEQ ID NO: 3725 - DNA, 23 bp, Artificial Sequence
  Description of Artificial Sequence: Synthetic oligonucleotide
ggaggatgagagcaggaaccagg

SEQ ID NO: 3726 - DNA, 23 bp, Artificial Sequence
  Description of Artificial Sequence: Synthetic oligonucleotide
gaggatgagagcaggaaccaggg

SEQ ID NO: 3727 - DNA, 23 bp, Artificial Sequence
  Description of Artificial Sequence: Synthetic oligonucleotide
gatgagagcaggaaccagggagg

SEQ ID NO: 3728 - DNA, 23 bp, Artificial Sequence
  Description of Artificial Sequence: Synthetic oligonucleotide
tccaaggctcatgacctccctgg

SEQ ID NO: 3729 - DNA, 23 bp, Artificial Sequence
  Description of Artificial Sequence: Synthetic oligonucleotide
accagggaggtcatgagccttgg

SEQ ID NO: 3730 - DNA, 23 bp, Artificial Sequence
  Description of Artificial Sequence: Synthetic oligonucleotide
gaggtcatgagccttggacaagg

SEQ ID NO: 3731 - DNA, 23 bp, Artificial Sequence
  Description of Artificial Sequence: Synthetic oligonucleotide
ctgttctgtgcccttgtccaagg

SEQ ID NO: 3732 - DNA, 23 bp, Artificial Sequence
  Description of Artificial Sequence: Synthetic oligonucleotide
aggtcatgagccttggacaaggg

SEQ ID NO: 3733 - DNA, 23 bp, Artificial Sequence
  Description of Artificial Sequence: Synthetic oligonucleotide
tggctggctgcacatggctctgg

SEQ ID NO: 3734 - DNA, 23 bp, Artificial Sequence
  Description of Artificial Sequence: Synthetic oligonucleotide
tgacagtggctggctgcacatgg

SEQ ID NO: 3735 - DNA, 23 bp, Artificial Sequence
  Description of Artificial Sequence: Synthetic oligonucleotide
tgcatggttctgacagtggctgg

SEQ ID NO: 3736 - DNA, 23 bp, Artificial Sequence
  Description of Artificial Sequence: Synthetic oligonucleotide
cccttgcatggttctgacagtgg

SEQ ID NO: 3737 - DNA, 23 bp, Artificial Sequence
  Description of Artificial Sequence: Synthetic oligonucleotide
gccactgtcagaaccatgcaagg

SEQ ID NO: 3738 - DNA, 23 bp, Artificial Sequence
  Description of Artificial Sequence: Synthetic oligonucleotide
ccactgtcagaaccatgcaaggg

SEQ ID NO: 3739 - DNA, 23 bp, Artificial Sequence
  Description of Artificial Sequence: Synthetic oligonucleotide
cactgtcagaaccatgcaagggg

SEQ ID NO: 3740 - DNA, 23 bp, Artificial Sequence
  Description of Artificial Sequence: Synthetic oligonucleotide
gctgagtggtcccccttgcatgg

SEQ ID NO: 3741 - DNA, 23 bp, Artificial Sequence
  Description of Artificial Sequence: Synthetic oligonucleotide
actgtcagaaccatgcaaggggg

SEQ ID NO: 3742 - DNA, 23 bp, Artificial Sequence
  Description of Artificial Sequence: Synthetic oligonucleotide
agggaggctggggcgctgagtgg

SEQ ID NO: 3743 - DNA, 23 bp, Artificial Sequence
  Description of Artificial Sequence: Synthetic oligonucleotide
actgtctgagagggaggctgggg

SEQ ID NO: 3744 - DNA, 23 bp, Artificial Sequence
  Description of Artificial Sequence: Synthetic oligonucleotide
aactgtctgagagggaggctggg

SEQ ID NO: 3745 - DNA, 23 bp, Artificial Sequence
  Description of Artificial Sequence: Synthetic oligonucleotide
caactgtctgagagggaggctgg

SEQ ID NO: 3746 - DNA, 23 bp, Artificial Sequence
  Description of Artificial Sequence: Synthetic oligonucleotide
atggcaactgtctgagagggagg

SEQ ID NO: 3747 - DNA, 23 bp, Artificial Sequence
  Description of Artificial Sequence: Synthetic oligonucleotide
cagatggcaactgtctgagaggg

SEQ ID NO: 3748 - DNA, 23 bp, Artificial Sequence
  Description of Artificial Sequence: Synthetic oligonucleotide
ccagatggcaactgtctgagagg

SEQ ID NO: 3749 - DNA, 23 bp, Artificial Sequence
  Description of Artificial Sequence: Synthetic oligonucleotide
cctctcagacagttgccatctgg

SEQ ID NO: 3750 - DNA, 23 bp, Artificial Sequence
  Description of Artificial Sequence: Synthetic oligonucleotide
ctctcagacagttgccatctggg

SEQ ID NO: 3751 - DNA, 23 bp, Artificial Sequence
  Description of Artificial Sequence: Synthetic oligonucleotide
cagccaacaagagacccagatgg

SEQ ID NO: 3752 - DNA, 23 bp, Artificial Sequence
  Description of Artificial Sequence: Synthetic oligonucleotide
ttgccatctgggtctcttgttgg

SEQ ID NO: 3753 - DNA, 23 bp, Artificial Sequence
  Description of Artificial Sequence: Synthetic oligonucleotide
ttgttggctgatgcgagagcagg

SEQ ID NO: 3754 - DNA, 23 bp, Artificial Sequence
  Description of Artificial Sequence: Synthetic oligonucleotide
ttggctgatgcgagagcaggagg

SEQ ID NO: 3755 - DNA, 23 bp, Artificial Sequence
  Description of Artificial Sequence: Synthetic oligonucleotide
tggctgatgcgagagcaggaggg

SEQ ID NO: 3756 - DNA, 23 bp, Artificial Sequence
  Description of Artificial Sequence: Synthetic oligonucleotide
gctctatgaactgcatcagtggg

SEQ ID NO: 3757 - DNA, 23 bp, Artificial Sequence
  Description of Artificial Sequence: Synthetic oligonucleotide
agctctatgaactgcatcagtgg

SEQ ID NO: 3758 - DNA, 23 bp, Artificial Sequence
  Description of Artificial Sequence: Synthetic oligonucleotide
gttcatagagctcagcctcctgg

SEQ ID NO: 3759 - DNA, 23 bp, Artificial Sequence
  Description of Artificial Sequence: Synthetic oligonucleotide
ttcatagagctcagcctcctggg

SEQ ID NO: 3760 - DNA, 23 bp, Artificial Sequence
  Description of Artificial Sequence: Synthetic oligonucleotide
tgcccggtttcctgcccaggagg

SEQ ID NO: 3761 - DNA, 23 bp, Artificial Sequence
  Description of Artificial Sequence: Synthetic oligonucleotide
tagagctcagcctcctgggcagg

SEQ ID NO: 3762 - DNA, 23 bp, Artificial Sequence
  Description of Artificial Sequence: Synthetic oligonucleotide
ctctgcccggtttcctgcccagg

SEQ ID NO: 3763 - DNA, 23 bp, Artificial Sequence
  Description of Artificial Sequence: Synthetic oligonucleotide
cagcctcctgggcaggaaaccgg

SEQ ID NO: 3764 - DNA, 23 bp, Artificial Sequence
  Description of Artificial Sequence: Synthetic oligonucleotide
agcctcctgggcaggaaaccggg

SEQ ID NO: 3765 - DNA, 23 bp, Artificial Sequence
  Description of Artificial Sequence: Synthetic oligonucleotide
cttttctactcctctctgcccgg

SEQ ID NO: 3766 - DNA, 23 bp, Artificial Sequence
  Description of Artificial Sequence: Synthetic oligonucleotide
gggcaggaaaccgggcagagagg

SEQ ID NO: 3767 - DNA, 23 bp, Artificial Sequence
  Description of Artificial Sequence: Synthetic oligonucleotide
agaggagtagaaaagaattaagg

SEQ ID NO: 3768 - DNA, 23 bp, Artificial Sequence
  Description of Artificial Sequence: Synthetic oligonucleotide
gaggagtagaaaagaattaaggg

SEQ ID NO: 3769 - DNA, 23 bp, Artificial Sequence
  Description of Artificial Sequence: Synthetic oligonucleotide
gagtagaaaagaattaagggtgg

SEQ ID NO: 3770 - DNA, 23 bp, Artificial Sequence
  Description of Artificial Sequence: Synthetic oligonucleotide
acgtgcctcagtgactgggctgg

SEQ ID NO: 3771 - DNA, 23 bp, Artificial Sequence
  Description of Artificial Sequence: Synthetic oligonucleotide
ggaaacgtgcctcagtgactggg

SEQ ID NO: 3772 - DNA, 23 bp, Artificial Sequence
  Description of Artificial Sequence: Synthetic oligonucleotide
gggaaacgtgcctcagtgactgg

SEQ ID NO: 3773 - DNA, 23 bp, Artificial Sequence
  Description of Artificial Sequence: Synthetic oligonucleotide
tgcgaccagcccagtcactgagg

SEQ ID NO: 3774 - DNA, 23 bp, Artificial Sequence
  Description of Artificial Sequence: Synthetic oligonucleotide
cactgaggcacgtttcccactgg

SEQ ID NO: 3775 - DNA, 23 bp, Artificial Sequence
  Description of Artificial Sequence: Synthetic oligonucleotide
tgtgctcataggtctccagtggg

SEQ ID NO: 3776 - DNA, 23 bp, Artificial Sequence
  Description of Artificial Sequence: Synthetic oligonucleotide
ctgtgctcataggtctccagtgg

SEQ ID NO: 3777 - DNA, 23 bp, Artificial Sequence
  Description of Artificial Sequence: Synthetic oligonucleotide
tttattatcactgtgctcatagg

SEQ ID NO: 3778 - DNA, 23 bp, Artificial Sequence
  Description of Artificial Sequence: Synthetic oligonucleotide
ggatagtcagtgcaggtaactgg

SEQ ID NO: 3779 - DNA, 23 bp, Artificial Sequence
  Description of Artificial Sequence: Synthetic oligonucleotide
tctggagggatagtcagtgcagg

SEQ ID NO: 3780 - DNA, 23 bp, Artificial Sequence
  Description of Artificial Sequence: Synthetic oligonucleotide
tgggaaagcttttgtctggaggg

SEQ ID NO: 3781 - DNA, 23 bp, Artificial Sequence
  Description of Artificial Sequence: Synthetic oligonucleotide
ttgggaaagcttttgtctggagg

SEQ ID NO: 3782 - DNA, 23 bp, Artificial Sequence
  Description of Artificial Sequence: Synthetic oligonucleotide
ttcttgggaaagcttttgtctgg

SEQ ID NO: 3783 - DNA, 23 bp, Artificial Sequence
  Description of Artificial Sequence: Synthetic oligonucleotide
agagccatgactaacttcttggg

SEQ ID NO: 3784 - DNA, 23 bp, Artificial Sequence
  Description of Artificial Sequence: Synthetic oligonucleotide
cagagccatgactaacttcttgg

SEQ ID NO: 3785 - DNA, 23 bp, Artificial Sequence
  Description of Artificial Sequence: Synthetic oligonucleotide
ctttcccaagaagttagtcatgg

SEQ ID NO: 3786 - DNA, 23 bp, Artificial Sequence
  Description of Artificial Sequence: Synthetic oligonucleotide
ggctctgagagatctagttgagg

SEQ ID NO: 3787 - DNA, 23 bp, Artificial Sequence
  Description of Artificial Sequence: Synthetic oligonucleotide
gagatctagttgaggatgtttgg

SEQ ID NO: 3788 - DNA, 23 bp, Artificial Sequence
  Description of Artificial Sequence: Synthetic oligonucleotide
tctagttgaggatgtttggcagg

SEQ ID NO: 3789 - DNA, 23 bp, Artificial Sequence
  Description of Artificial Sequence: Synthetic oligonucleotide
ctagttgaggatgtttggcaggg

SEQ ID NO: 3790 - DNA, 23 bp, Artificial Sequence
  Description of Artificial Sequence: Synthetic oligonucleotide
tagttgaggatgtttggcagggg

SEQ ID NO: 3791 - DNA, 23 bp, Artificial Sequence
  Description of Artificial Sequence: Synthetic oligonucleotide
atgtttggcaggggatctagtgg

SEQ ID NO: 3792 - DNA, 23 bp, Artificial Sequence
  Description of Artificial Sequence: Synthetic oligonucleotide
ggcaggggatctagtggttacgg

SEQ ID NO: 3793 - DNA, 23 bp, Artificial Sequence
  Description of Artificial Sequence: Synthetic oligonucleotide
gcaggggatctagtggttacggg

SEQ ID NO: 3794 - DNA, 23 bp, Artificial Sequence
  Description of Artificial Sequence: Synthetic oligonucleotide
ggggatctagtggttacgggtgg

SEQ ID NO: 3795 - DNA, 23 bp, Artificial Sequence
  Description of Artificial Sequence: Synthetic oligonucleotide
acgggtggctaagaaaaatgagg

SEQ ID NO: 3796 - DNA, 23 bp, Artificial Sequence
  Description of Artificial Sequence: Synthetic oligonucleotide
gtggctaagaaaaatgaggaagg

SEQ ID NO: 3797 - DNA, 23 bp, Artificial Sequence
  Description of Artificial Sequence: Synthetic oligonucleotide
gagtatcttgcagcctgtgttgg

SEQ ID NO: 3798 - DNA, 23 bp, Artificial Sequence
  Description of Artificial Sequence: Synthetic oligonucleotide
agtatcttgcagcctgtgttggg

SEQ ID NO: 3799 - DNA, 23 bp, Artificial Sequence
  Description of Artificial Sequence: Synthetic oligonucleotide
ctatttaatcctcccaacacagg

SEQ ID NO: 3800 - DNA, 23 bp, Artificial Sequence
  Description of Artificial Sequence: Synthetic oligonucleotide
atcttgcagcctgtgttgggagg

SEQ ID NO: 3801 - DNA, 23 bp, Artificial Sequence
  Description of Artificial Sequence: Synthetic oligonucleotide
ctgtgttgggaggattaaatagg

SEQ ID NO: 3802 - DNA, 23 bp, Artificial Sequence
  Description of Artificial Sequence: Synthetic oligonucleotide
ttaaataggatgccacacacagg

SEQ ID NO: 3803 - DNA, 23 bp, Artificial Sequence
  Description of Artificial Sequence: Synthetic oligonucleotide
taaataggatgccacacacaggg

SEQ ID NO: 3804 - DNA, 23 bp, Artificial Sequence
  Description of Artificial Sequence: Synthetic oligonucleotide
tgtctgcctggccctgtgtgtgg

SEQ ID NO: 3805 - DNA, 23 bp, Artificial Sequence
  Description of Artificial Sequence: Synthetic oligonucleotide
aggatgccacacacagggccagg

SEQ ID NO: 3806 - DNA, 23 bp, Artificial Sequence
  Description of Artificial Sequence: Synthetic oligonucleotide
tactgaccaggctgtctgcctgg

SEQ ID NO: 3807 - DNA, 23 bp, Artificial Sequence
  Description of Artificial Sequence: Synthetic oligonucleotide
acagggccaggcagacagcctgg

SEQ ID NO: 3808 - DNA, 23 bp, Artificial Sequence
  Description of Artificial Sequence: Synthetic oligonucleotide
cgtcatggctattactgaccagg

SEQ ID NO: 3809 - DNA, 23 bp, Artificial Sequence
  Description of Artificial Sequence: Synthetic oligonucleotide
gtcagtaatagccatgacgatgg

SEQ ID NO: 3810 - DNA, 23 bp, Artificial Sequence
  Description of Artificial Sequence: Synthetic oligonucleotide
tccccccgcccccatcgtcatgg

SEQ ID NO: 3811 - DNA, 23 bp, Artificial Sequence
  Description of Artificial Sequence: Synthetic oligonucleotide
tcagtaatagccatgacgatggg

SEQ ID NO: 3812 - DNA, 23 bp, Artificial Sequence
  Description of Artificial Sequence: Synthetic oligonucleotide
cagtaatagccatgacgatgggg

SEQ ID NO: 3813 - DNA, 23 bp, Artificial Sequence
  Description of Artificial Sequence: Synthetic oligonucleotide
agtaatagccatgacgatggggg

SEQ ID NO: 3814 - DNA, 23 bp, Artificial Sequence
  Description of Artificial Sequence: Synthetic oligonucleotide
aatagccatgacgatgggggcgg

SEQ ID NO: 3815 - DNA, 23 bp, Artificial Sequence
  Description of Artificial Sequence: Synthetic oligonucleotide
atagccatgacgatgggggcggg

SEQ ID NO: 3816 - DNA, 23 bp, Artificial Sequence
  Description of Artificial Sequence: Synthetic oligonucleotide
tagccatgacgatgggggcgggg

SEQ ID NO: 3817 - DNA, 23 bp, Artificial Sequence
  Description of Artificial Sequence: Synthetic oligonucleotide
agccatgacgatgggggcggggg

SEQ ID NO: 3818 - DNA, 23 bp, Artificial Sequence
  Description of Artificial Sequence: Synthetic oligonucleotide
gccatgacgatgggggcgggggg

SEQ ID NO: 3819 - DNA, 23 bp, Artificial Sequence
  Description of Artificial Sequence: Synthetic oligonucleotide
acgatgggggcggggggagcagg

SEQ ID NO: 3820 - DNA, 23 bp, Artificial Sequence
  Description of Artificial Sequence: Synthetic oligonucleotide
gggggcggggggagcaggaatgg

SEQ ID NO: 3821 - DNA, 23 bp, Artificial Sequence
  Description of Artificial Sequence: Synthetic oligonucleotide
ggggcggggggagcaggaatggg

SEQ ID NO: 3822 - DNA, 23 bp, Artificial Sequence
  Description of Artificial Sequence: Synthetic oligonucleotide
agagtggaagcatctctcacagg

SEQ ID NO: 3823 - DNA, 23 bp, Artificial Sequence
  Description of Artificial Sequence: Synthetic oligonucleotide
gtctcatctttctgtgagagtgg

SEQ ID NO: 3824 - DNA, 23 bp, Artificial Sequence
  Description of Artificial Sequence: Synthetic oligonucleotide
ctcacagaaagatgagaccaagg

SEQ ID NO: 3825 - DNA, 23 bp, Artificial Sequence
  Description of Artificial Sequence: Synthetic oligonucleotide
gaaagatgagaccaaggaaaagg

SEQ ID NO: 3826 - DNA, 23 bp, Artificial Sequence
  Description of Artificial Sequence: Synthetic oligonucleotide
ctcttcctcctccttttccttgg

SEQ ID NO: 3827 - DNA, 23 bp, Artificial Sequence
  Description of Artificial Sequence: Synthetic oligonucleotide
agatgagaccaaggaaaaggagg

SEQ ID NO: 3828 - DNA, 23 bp, Artificial Sequence
  Description of Artificial Sequence: Synthetic oligonucleotide
tgagaccaaggaaaaggaggagg

SEQ ID NO: 3829 - DNA, 23 bp, Artificial Sequence
  Description of Artificial Sequence: Synthetic oligonucleotide
caaggaaaaggaggaggaagagg

SEQ ID NO: 3830 - DNA, 23 bp, Artificial Sequence
  Description of Artificial Sequence: Synthetic oligonucleotide
gaaaaggaggaggaagaggaagg

SEQ ID NO: 3831 - DNA, 23 bp, Artificial Sequence
  Description of Artificial Sequence: Synthetic oligonucleotide
gtgggccccaaggtttgtcaagg

SEQ ID NO: 3832 - DNA, 23 bp, Artificial Sequence
  Description of Artificial Sequence: Synthetic oligonucleotide
ggaaggaccttgacaaaccttgg

SEQ ID NO: 3833 - DNA, 23 bp, Artificial Sequence
  Description of Artificial Sequence: Synthetic oligonucleotide
gaaggaccttgacaaaccttggg

SEQ ID NO: 3834 - DNA, 23 bp, Artificial Sequence
  Description of Artificial Sequence: Synthetic oligonucleotide
aaggaccttgacaaaccttgggg

SEQ ID NO: 3835 - DNA, 23 bp, Artificial Sequence
  Description of Artificial Sequence: Synthetic oligonucleotide
tgtagacaatgtgggccccaagg

SEQ ID NO: 3836 - DNA, 23 bp, Artificial Sequence
  Description of Artificial Sequence: Synthetic oligonucleotide
aagggaggtgtagacaatgtggg

SEQ ID NO: 3837 - DNA, 23 bp, Artificial Sequence
  Description of Artificial Sequence: Synthetic oligonucleotide
gaagggaggtgtagacaatgtgg

SEQ ID NO: 3838 - DNA, 23 bp, Artificial Sequence
  Description of Artificial Sequence: Synthetic oligonucleotide
ctgctctagagcaggaagggagg

SEQ ID NO: 3839 - DNA, 23 bp, Artificial Sequence
  Description of Artificial Sequence: Synthetic oligonucleotide
attctgctctagagcaggaaggg

SEQ ID NO: 3840 - DNA, 23 bp, Artificial Sequence
  Description of Artificial Sequence: Synthetic oligonucleotide
tattctgctctagagcaggaagg

SEQ ID NO: 3841 - DNA, 23 bp, Artificial Sequence
  Description of Artificial Sequence: Synthetic oligonucleotide
tttctattctgctctagagcagg

SEQ ID NO: 3842 - DNA, 23 bp, Artificial Sequence
  Description of Artificial Sequence: Synthetic oligonucleotide
tagagcagaatagaaagttcagg

SEQ ID NO: 3843 - DNA, 23 bp, Artificial Sequence
  Description of Artificial Sequence: Synthetic oligonucleotide
gaatagaaagttcaggttgcagg

SEQ ID NO: 3844 - DNA, 23 bp, Artificial Sequence
  Description of Artificial Sequence: Synthetic oligonucleotide
agcaataaagaaaattaaacagg

SEQ ID NO: 3845 - DNA, 23 bp, Artificial Sequence
  Description of Artificial Sequence: Synthetic oligonucleotide
tacgtcagcatcacagacacagg

SEQ ID NO: 3846 - DNA, 23 bp, Artificial Sequence
  Description of Artificial Sequence: Synthetic oligonucleotide
gatgctgacgtatgttcctaagg

SEQ ID NO: 3847 - DNA, 23 bp, Artificial Sequence
  Description of Artificial Sequence: Synthetic oligonucleotide
tgacgtatgttcctaaggagagg

SEQ ID NO: 3848 - DNA, 23 bp, Artificial Sequence
  Description of Artificial Sequence: Synthetic oligonucleotide
tgaacttctcccctctccttagg

SEQ ID NO: 3849 - DNA, 23 bp, Artificial Sequence
  Description of Artificial Sequence: Synthetic oligonucleotide
gacgtatgttcctaaggagaggg

SEQ ID NO: 3850 - DNA, 23 bp, Artificial Sequence
  Description of Artificial Sequence: Synthetic oligonucleotide
acgtatgttcctaaggagagggg

SEQ ID NO: 3851 - DNA, 23 bp, Artificial Sequence
  Description of Artificial Sequence: Synthetic oligonucleotide
cattcttgctggacagagagagg

SEQ ID NO: 3852 - DNA, 23 bp, Artificial Sequence
  Description of Artificial Sequence: Synthetic oligonucleotide
ggggaatattccattcttgctgg

SEQ ID NO: 3853 - DNA, 23 bp, Artificial Sequence
  Description of Artificial Sequence: Synthetic oligonucleotide
ctctctctgtccagcaagaatgg

SEQ ID NO: 3854 - DNA, 23 bp, Artificial Sequence
  Description of Artificial Sequence: Synthetic oligonucleotide
agaatggaatattccccaagtgg

SEQ ID NO: 3855 - DNA, 23 bp, Artificial Sequence
  Description of Artificial Sequence: Synthetic oligonucleotide
aagctggctcaggccacttgggg

SEQ ID NO: 3856 - DNA, 23 bp, Artificial Sequence
  Description of Artificial Sequence: Synthetic oligonucleotide
caagctggctcaggccacttggg

SEQ ID NO: 3857 - DNA, 23 bp, Artificial Sequence
  Description of Artificial Sequence: Synthetic oligonucleotide
ccaagctggctcaggccacttgg

SEQ ID NO: 3858 - DNA, 23 bp, Artificial Sequence
  Description of Artificial Sequence: Synthetic oligonucleotide
aaagaaagccaagctggctcagg

SEQ ID NO: 3859 - DNA, 23 bp, Artificial Sequence
  Description of Artificial Sequence: Synthetic oligonucleotide
ccaagtggcctgagccagcttgg

SEQ ID NO: 3860 - DNA, 23 bp, Artificial Sequence
  Description of Artificial Sequence: Synthetic oligonucleotide
aaacaaaaagaaagccaagctgg

SEQ ID NO: 3861 - DNA, 23 bp, Artificial Sequence
  Description of Artificial Sequence: Synthetic oligonucleotide
tctttttgttttcaattatgtgg

SEQ ID NO: 3862 - DNA, 23 bp, Artificial Sequence
  Description of Artificial Sequence: Synthetic oligonucleotide
ctttttgttttcaattatgtggg

SEQ ID NO: 3863 - DNA, 23 bp, Artificial Sequence
  Description of Artificial Sequence: Synthetic oligonucleotide
tttcaattatgtgggagttgagg

SEQ ID NO: 3864 - DNA, 23 bp, Artificial Sequence
  Description of Artificial Sequence: Synthetic oligonucleotide
caattatgtgggagttgaggagg

SEQ ID NO: 3865 - DNA, 23 bp, Artificial Sequence
  Description of Artificial Sequence: Synthetic oligonucleotide
aattatgtgggagttgaggaggg

SEQ ID NO: 3866 - DNA, 23 bp, Artificial Sequence
  Description of Artificial Sequence: Synthetic oligonucleotide
attatgtgggagttgaggagggg

SEQ ID NO: 3867 - DNA, 23 bp, Artificial Sequence
  Description of Artificial Sequence: Synthetic oligonucleotide
ttatgtgggagttgaggaggggg

SEQ ID NO: 3868 - DNA, 23 bp, Artificial Sequence
  Description of Artificial Sequence: Synthetic oligonucleotide
gtgggagttgaggagggggatgg

SEQ ID NO: 3869 - DNA, 23 bp, Artificial Sequence
  Description of Artificial Sequence: Synthetic oligonucleotide
tgggagttgaggagggggatggg

SEQ ID NO: 3870 - DNA, 23 bp, Artificial Sequence
  Description of Artificial Sequence: Synthetic oligonucleotide
gcctgggggagggtgtgtttggg

SEQ ID NO: 3871 - DNA, 23 bp, Artificial Sequence
  Description of Artificial Sequence: Synthetic oligonucleotide
ggcctgggggagggtgtgtttgg

SEQ ID NO: 3872 - DNA, 23 bp, Artificial Sequence
  Description of Artificial Sequence: Synthetic oligonucleotide
tcccaaacacaccctcccccagg

SEQ ID NO: 3873 - DNA, 23 bp, Artificial Sequence
  Description of Artificial Sequence: Synthetic oligonucleotide
ggtgcctcaggcctgggggaggg

SEQ ID NO: 3874 - DNA, 23 bp, Artificial Sequence
  Description of Artificial Sequence: Synthetic oligonucleotide
gggtgcctcaggcctgggggagg

SEQ ID NO: 3875 - DNA, 23 bp, Artificial Sequence
  Description of Artificial Sequence: Synthetic oligonucleotide
caggggtgcctcaggcctggggg

SEQ ID NO: 3876 - DNA, 23 bp, Artificial Sequence
  Description of Artificial Sequence: Synthetic oligonucleotide
ccaggggtgcctcaggcctgggg

SEQ ID NO: 3877 - DNA, 23 bp, Artificial Sequence
  Description of Artificial Sequence: Synthetic oligonucleotide
cccaggggtgcctcaggcctggg

SEQ ID NO: 3878 - DNA, 23 bp, Artificial Sequence
  Description of Artificial Sequence: Synthetic oligonucleotide
cacaccctcccccaggcctgagg

SEQ ID NO: 3879 - DNA, 23 bp, Artificial Sequence
  Description of Artificial Sequence: Synthetic oligonucleotide
ccccaggggtgcctcaggcctgg

SEQ ID NO: 3880 - DNA, 23 bp, Artificial Sequence
  Description of Artificial Sequence: Synthetic oligonucleotide
ctgtcccccaggggtgcctcagg

SEQ ID NO: 3881 - DNA, 23 bp, Artificial Sequence
  Description of Artificial Sequence: Synthetic oligonucleotide
ccccaggcctgaggcacccctgg

SEQ ID NO: 3882 - DNA, 23 bp, Artificial Sequence
  Description of Artificial Sequence: Synthetic oligonucleotide
cccaggcctgaggcacccctggg

SEQ ID NO: 3883 - DNA, 23 bp, Artificial Sequence
  Description of Artificial Sequence: Synthetic oligonucleotide
ccaggcctgaggcacccctgggg

SEQ ID NO: 3884 - DNA, 23 bp, Artificial Sequence
  Description of Artificial Sequence: Synthetic oligonucleotide
caggcctgaggcacccctggggg

SEQ ID NO: 3885 - DNA, 23 bp, Artificial Sequence
  Description of Artificial Sequence: Synthetic oligonucleotide
taacactctctgtcccccagggg

SEQ ID NO: 3886 - DNA, 23 bp, Artificial Sequence
  Description of Artificial Sequence: Synthetic oligonucleotide
ctaacactctctgtcccccaggg

SEQ ID NO: 3887 - DNA, 23 bp, Artificial Sequence
  Description of Artificial Sequence: Synthetic oligonucleotide
tctaacactctctgtcccccagg

SEQ ID NO: 3888 - DNA, 23 bp, Artificial Sequence
  Description of Artificial Sequence: Synthetic oligonucleotide
tgggggacagagagtgttagagg

SEQ ID NO: 3889 - DNA, 23 bp, Artificial Sequence
  Description of Artificial Sequence: Synthetic oligonucleotide
ggacagagagtgttagaggttgg

SEQ ID NO: 3890 - DNA, 23 bp, Artificial Sequence
  Description of Artificial Sequence: Synthetic oligonucleotide
agagtgttagaggttggtacagg

SEQ ID NO: 3891 - DNA, 23 bp, Artificial Sequence
  Description of Artificial Sequence: Synthetic oligonucleotide
caggtgttagagatattgaaagg

SEQ ID NO: 3892 - DNA, 23 bp, Artificial Sequence
  Description of Artificial Sequence: Synthetic oligonucleotide
caccagcccctggggtgcatggg

SEQ ID NO: 3893 - DNA, 23 bp, Artificial Sequence
  Description of Artificial Sequence: Synthetic oligonucleotide
acaccagcccctggggtgcatgg

SEQ ID NO: 3894 - DNA, 23 bp, Artificial Sequence
  Description of Artificial Sequence: Synthetic oligonucleotide
aaggacatcccatgcaccccagg

SEQ ID NO: 3895 - DNA, 23 bp, Artificial Sequence
  Description of Artificial Sequence: Synthetic oligonucleotide
aggacatcccatgcaccccaggg

SEQ ID NO: 3896 - DNA, 23 bp, Artificial Sequence
  Description of Artificial Sequence: Synthetic oligonucleotide
ggacatcccatgcaccccagggg

SEQ ID NO: 3897 - DNA, 23 bp, Artificial Sequence
  Description of Artificial Sequence: Synthetic oligonucleotide
cagagccacaccagcccctgggg

SEQ ID NO: 3898 - DNA, 23 bp, Artificial Sequence
  Description of Artificial Sequence: Synthetic oligonucleotide
atcccatgcaccccaggggctgg

SEQ ID NO: 3899 - DNA, 23 bp, Artificial Sequence
  Description of Artificial Sequence: Synthetic oligonucleotide
acagagccacaccagcccctggg

SEQ ID NO: 3900 - DNA, 23 bp, Artificial Sequence
  Description of Artificial Sequence: Synthetic oligonucleotide
tacagagccacaccagcccctgg

SEQ ID NO: 3901 - DNA, 23 bp, Artificial Sequence
  Description of Artificial Sequence: Synthetic oligonucleotide
atgcaccccaggggctggtgtgg

SEQ ID NO: 3902 - DNA, 23 bp, Artificial Sequence
  Description of Artificial Sequence: Synthetic oligonucleotide
tggtgtggctctgtacttccagg

SEQ ID NO: 3903 - DNA, 23 bp, Artificial Sequence
  Description of Artificial Sequence: Synthetic oligonucleotide
cccttccacaaaatattgcctgg

SEQ ID NO: 3904 - DNA, 23 bp, Artificial Sequence
  Description of Artificial Sequence: Synthetic oligonucleotide
tacttccaggcaatattttgtgg

SEQ ID NO: 3905 - DNA, 23 bp, Artificial Sequence
  Description of Artificial Sequence: Synthetic oligonucleotide
tccaggcaatattttgtggaagg

SEQ ID NO: 3906 - DNA, 23 bp, Artificial Sequence
  Description of Artificial Sequence: Synthetic oligonucleotide
ccaggcaatattttgtggaaggg

SEQ ID NO: 3907 - DNA, 23 bp, Artificial Sequence
  Description of Artificial Sequence: Synthetic oligonucleotide
caggcaatattttgtggaagggg

SEQ ID NO: 3908 - DNA, 23 bp, Artificial Sequence
  Description of Artificial Sequence: Synthetic oligonucleotide
tccacaacctggagctgacaagg

SEQ ID NO: 3909 - DNA, 23 bp, Artificial Sequence
  Description of Artificial Sequence: Synthetic oligonucleotide
aggggaaccttgtcagctccagg

SEQ ID NO: 3910 - DNA, 23 bp, Artificial Sequence
  Description of Artificial Sequence: Synthetic oligonucleotide
accttgtcagctccaggttgtgg

SEQ ID NO: 3911 - DNA, 23 bp, Artificial Sequence
  Description of Artificial Sequence: Synthetic oligonucleotide
attttcaaacatccacaacctgg

SEQ ID NO: 3912 - DNA, 23 bp, Artificial Sequence
  Description of Artificial Sequence: Synthetic oligonucleotide
gtggatgtttgaaaatcagttgg

SEQ ID NO: 3913 - DNA, 23 bp, Artificial Sequence
  Description of Artificial Sequence: Synthetic oligonucleotide
gaaaatcagttggtacccagtgg

SEQ ID NO: 3914 - DNA, 23 bp, Artificial Sequence
  Description of Artificial Sequence: Synthetic oligonucleotide
tgccagaggatggagccactggg

SEQ ID NO: 3915 - DNA, 23 bp, Artificial Sequence
  Description of Artificial Sequence: Synthetic oligonucleotide
ctgccagaggatggagccactgg

SEQ ID NO: 3916 - DNA, 23 bp, Artificial Sequence
  Description of Artificial Sequence: Synthetic oligonucleotide
tacccagtggctccatcctctgg

SEQ ID NO: 3917 - DNA, 23 bp, Artificial Sequence
  Description of Artificial Sequence: Synthetic oligonucleotide
tccacatgcctgccagaggatgg

SEQ ID NO: 3918 - DNA, 23 bp, Artificial Sequence
  Description of Artificial Sequence: Synthetic oligonucleotide
cagtggctccatcctctggcagg

SEQ ID NO: 3919 - DNA, 23 bp, Artificial Sequence
  Description of Artificial Sequence: Synthetic oligonucleotide
caaatccacatgcctgccagagg

SEQ ID NO: 3920 - DNA, 23 bp, Artificial Sequence
  Description of Artificial Sequence: Synthetic oligonucleotide
tccatcctctggcaggcatgtgg

SEQ ID NO: 3921 - DNA, 23 bp, Artificial Sequence
  Description of Artificial Sequence: Synthetic oligonucleotide
cttattttggagagttcacttgg

SEQ ID NO: 3922 - DNA, 23 bp, Artificial Sequence
  Description of Artificial Sequence: Synthetic oligonucleotide
gaggaagttttaacttattttgg

SEQ ID NO: 3923 - DNA, 23 bp, Artificial Sequence
  Description of Artificial Sequence: Synthetic oligonucleotide
catcttgaaactgagaagggagg

SEQ ID NO: 3924 - DNA, 23 bp, Artificial Sequence
  Description of Artificial Sequence: Synthetic oligonucleotide
cagcatcttgaaactgagaaggg

SEQ ID NO: 3925 - DNA, 23 bp, Artificial Sequence
  Description of Artificial Sequence: Synthetic oligonucleotide
ccagcatcttgaaactgagaagg

SEQ ID NO: 3926 - DNA, 23 bp, Artificial Sequence
  Description of Artificial Sequence: Synthetic oligonucleotide
ccttctcagtttcaagatgctgg

SEQ ID NO: 3927 - DNA, 23 bp, Artificial Sequence
  Description of Artificial Sequence: Synthetic oligonucleotide
aaatagctgttcataagccctgg

SEQ ID NO: 3928 - DNA, 23 bp, Artificial Sequence
  Description of Artificial Sequence: Synthetic oligonucleotide
aatagctgttcataagccctggg

SEQ ID NO: 3929 - DNA, 23 bp, Artificial Sequence
  Description of Artificial Sequence: Synthetic oligonucleotide
atagctgttcataagccctgggg

SEQ ID NO: 3930 - DNA, 23 bp, Artificial Sequence
  Description of Artificial Sequence: Synthetic oligonucleotide
caaagggctaaatttccccaggg

SEQ ID NO: 3931 - DNA, 23 bp, Artificial Sequence
  Description of Artificial Sequence: Synthetic oligonucleotide
ccaaagggctaaatttccccagg

SEQ ID NO: 3932 - DNA, 23 bp, Artificial Sequence
  Description of Artificial Sequence: Synthetic oligonucleotide
cctggggaaatttagccctttgg

SEQ ID NO: 3933 - DNA, 23 bp, Artificial Sequence
  Description of Artificial Sequence: Synthetic oligonucleotide
gggaaatttagccctttggctgg

SEQ ID NO: 3934 - DNA, 23 bp, Artificial Sequence
  Description of Artificial Sequence: Synthetic oligonucleotide
tactcccattaccagccaaaggg

SEQ ID NO: 3935 - DNA, 23 bp, Artificial Sequence
  Description of Artificial Sequence: Synthetic oligonucleotide
atactcccattaccagccaaagg

SEQ ID NO: 3936 - DNA, 23 bp, Artificial Sequence
  Description of Artificial Sequence: Synthetic oligonucleotide
tttagccctttggctggtaatgg

SEQ ID NO: 3937 - DNA, 23 bp, Artificial Sequence
  Description of Artificial Sequence: Synthetic oligonucleotide
ttagccctttggctggtaatggg

SEQ ID NO: 3938 - DNA, 23 bp, Artificial Sequence
  Description of Artificial Sequence: Synthetic oligonucleotide
ttccagctgccctctcatctcgg

SEQ ID NO: 3939 - DNA, 23 bp, Artificial Sequence
  Description of Artificial Sequence: Synthetic oligonucleotide
atgggagtatccgagatgagagg

SEQ ID NO: 3940 - DNA, 23 bp, Artificial Sequence
  Description of Artificial Sequence: Synthetic oligonucleotide
tgggagtatccgagatgagaggg

SEQ ID NO: 3941 - DNA, 23 bp, Artificial Sequence
  Description of Artificial Sequence: Synthetic oligonucleotide
atccgagatgagagggcagctgg

SEQ ID NO: 3942 - DNA, 23 bp, Artificial Sequence
  Description of Artificial Sequence: Synthetic oligonucleotide
agagggcagctggaaactttcgg

SEQ ID NO: 3943 - DNA, 23 bp, Artificial Sequence
  Description of Artificial Sequence: Synthetic oligonucleotide
tttcccaaattaagtgtgggagg

SEQ ID NO: 3944 - DNA, 23 bp, Artificial Sequence
  Description of Artificial Sequence: Synthetic oligonucleotide
gcatttcccaaattaagtgtggg

SEQ ID NO: 3945 - DNA, 23 bp, Artificial Sequence
  Description of Artificial Sequence: Synthetic oligonucleotide
ggcatttcccaaattaagtgtgg

SEQ ID NO: 3946 - DNA, 23 bp, Artificial Sequence
  Description of Artificial Sequence: Synthetic oligonucleotide
atgacctcccacacttaatttgg

SEQ ID NO: 3947 - DNA, 23 bp, Artificial Sequence
  Description of Artificial Sequence: Synthetic oligonucleotide
tgacctcccacacttaatttggg

SEQ ID NO: 3948 - DNA, 23 bp, Artificial Sequence
  Description of Artificial Sequence: Synthetic oligonucleotide
ggttgcccataaaggtgcagagg

SEQ ID NO: 3949 - DNA, 23 bp, Artificial Sequence
  Description of Artificial Sequence: Synthetic oligonucleotide
gaaatgcctctgcacctttatgg

SEQ ID NO: 3950 - DNA, 23 bp, Artificial Sequence
  Description of Artificial Sequence: Synthetic oligonucleotide
aaatgcctctgcacctttatggg

SEQ ID NO: 3951 - DNA, 23 bp, Artificial Sequence
  Description of Artificial Sequence: Synthetic oligonucleotide
aggcatctggttgcccataaagg

SEQ ID NO: 3952 - DNA, 23 bp, Artificial Sequence
  Description of Artificial Sequence: Synthetic oligonucleotide
cagcaactggggcaggcatctgg

SEQ ID NO: 3953 - DNA, 23 bp, Artificial Sequence
  Description of Artificial Sequence: Synthetic oligonucleotide
gtgtctccagcaactggggcagg

SEQ ID NO: 3954 - DNA, 23 bp, Artificial Sequence
  Description of Artificial Sequence: Synthetic oligonucleotide
atcagtgtctccagcaactgggg

SEQ ID NO: 3955 - DNA, 23 bp, Artificial Sequence
  Description of Artificial Sequence: Synthetic oligonucleotide
cagatgcctgccccagttgctgg

SEQ ID NO: 3956 - DNA, 23 bp, Artificial Sequence
  Description of Artificial Sequence: Synthetic oligonucleotide
catcagtgtctccagcaactggg

SEQ ID NO: 3957 - DNA, 23 bp, Artificial Sequence
  Description of Artificial Sequence: Synthetic oligonucleotide
acatcagtgtctccagcaactgg

SEQ ID NO: 3958 - DNA, 23 bp, Artificial Sequence
  Description of Artificial Sequence: Synthetic oligonucleotide
agttgctggagacactgatgtgg

SEQ ID NO: 3959 - DNA, 23 bp, Artificial Sequence
  Description of Artificial Sequence: Synthetic oligonucleotide
gttgctggagacactgatgtggg

SEQ ID NO: 3960 - DNA, 23 bp, Artificial Sequence
  Description of Artificial Sequence: Synthetic oligonucleotide
agacactgatgtgggctgaaagg

SEQ ID NO: 3961 - DNA, 23 bp, Artificial Sequence
  Description of Artificial Sequence: Synthetic oligonucleotide
aggaatgctgagacgtgacgagg

SEQ ID NO: 3962 - DNA, 23 bp, Artificial Sequence
  Description of Artificial Sequence: Synthetic oligonucleotide
cgtgacgaggagagatgctgcgg

SEQ ID NO: 3963 - DNA, 23 bp, Artificial Sequence
  Description of Artificial Sequence: Synthetic oligonucleotide
gacgaggagagatgctgcggagg

SEQ ID NO: 3964 - DNA, 23 bp, Artificial Sequence
  Description of Artificial Sequence: Synthetic oligonucleotide
acgaggagagatgctgcggaggg

SEQ ID NO: 3965 - DNA, 23 bp, Artificial Sequence
  Description of Artificial Sequence: Synthetic oligonucleotide
cgatgaggtcagggctgaggggg

SEQ ID NO: 3966 - DNA, 23 bp, Artificial Sequence
  Description of Artificial Sequence: Synthetic oligonucleotide
ccgatgaggtcagggctgagggg

SEQ ID NO: 3967 - DNA, 23 bp, Artificial Sequence
  Description of Artificial Sequence: Synthetic oligonucleotide
gccgatgaggtcagggctgaggg

SEQ ID NO: 3968 - DNA, 23 bp, Artificial Sequence
  Description of Artificial Sequence: Synthetic oligonucleotide
agccgatgaggtcagggctgagg

SEQ ID NO: 3969 - DNA, 23 bp, Artificial Sequence
  Description of Artificial Sequence: Synthetic oligonucleotide
ccatggagccgatgaggtcaggg

SEQ ID NO: 3970 - DNA, 23 bp, Artificial Sequence
  Description of Artificial Sequence: Synthetic oligonucleotide
gccatggagccgatgaggtcagg

SEQ ID NO: 3971 - DNA, 23 bp, Artificial Sequence
  Description of Artificial Sequence: Synthetic oligonucleotide
cccctcagccctgacctcatcgg

SEQ ID NO: 3972 - DNA, 23 bp, Artificial Sequence
  Description of Artificial Sequence: Synthetic oligonucleotide
gaggagccatggagccgatgagg

SEQ ID NO: 3973 - DNA, 23 bp, Artificial Sequence
  Description of Artificial Sequence: Synthetic oligonucleotide
ccctgacctcatcggctccatgg

SEQ ID NO: 3974 - DNA, 23 bp, Artificial Sequence
  Description of Artificial Sequence: Synthetic oligonucleotide
gctgtactgtggaggagccatgg

SEQ ID NO: 3975 - DNA, 23 bp, Artificial Sequence
  Description of Artificial Sequence: Synthetic oligonucleotide
agtagacagctgtactgtggagg

SEQ ID NO: 3976 - DNA, 23 bp, Artificial Sequence
  Description of Artificial Sequence: Synthetic oligonucleotide
aagagtagacagctgtactgtgg

SEQ ID NO: 3977 - DNA, 23 bp, Artificial Sequence
  Description of Artificial Sequence: Synthetic oligonucleotide
ctcttttaagttctcccttcagg

SEQ ID NO: 3978 - DNA, 23 bp, Artificial Sequence
  Description of Artificial Sequence: Synthetic oligonucleotide
tgagatggctatttcctgaaggg

SEQ ID NO: 3979 - DNA, 23 bp, Artificial Sequence
  Description of Artificial Sequence: Synthetic oligonucleotide
ttgagatggctatttcctgaagg

SEQ ID NO: 3980 - DNA, 23 bp, Artificial Sequence
  Description of Artificial Sequence: Synthetic oligonucleotide
aatgcacattctgtttgagatgg

SEQ ID NO: 3981 - DNA, 23 bp, Artificial Sequence
  Description of Artificial Sequence: Synthetic oligonucleotide
tcaaacagaatgtgcatttgagg

SEQ ID NO: 3982 - DNA, 23 bp, Artificial Sequence
  Description of Artificial Sequence: Synthetic oligonucleotide
caaacagaatgtgcatttgaggg

SEQ ID NO: 3983 - DNA, 23 bp, Artificial Sequence
  Description of Artificial Sequence: Synthetic oligonucleotide
actactgtgttataaccgtcagg

SEQ ID NO: 3984 - DNA, 23 bp, Artificial Sequence
  Description of Artificial Sequence: Synthetic oligonucleotide
atcatcagcatggctcctgacgg

SEQ ID NO: 3985 - DNA, 23 bp, Artificial Sequence
  Description of Artificial Sequence: Synthetic oligonucleotide
gggacgtttcatcatcagcatgg

SEQ ID NO: 3986 - DNA, 23 bp, Artificial Sequence
  Description of Artificial Sequence: Synthetic oligonucleotide
tgatgaaacgtcccagatgccgg

SEQ ID NO: 3987 - DNA, 23 bp, Artificial Sequence
  Description of Artificial Sequence: Synthetic oligonucleotide
cctttccagcaccggcatctggg

SEQ ID NO: 3988 - DNA, 23 bp, Artificial Sequence
  Description of Artificial Sequence: Synthetic oligonucleotide
acctttccagcaccggcatctgg

SEQ ID NO: 3989 - DNA, 23 bp, Artificial Sequence
  Description of Artificial Sequence: Synthetic oligonucleotide
aacgtcccagatgccggtgctgg

SEQ ID NO: 3990 - DNA, 23 bp, Artificial Sequence
  Description of Artificial Sequence: Synthetic oligonucleotide
gccagggacctttccagcaccgg

SEQ ID NO: 3991 - DNA, 23 bp, Artificial Sequence
  Description of Artificial Sequence: Synthetic oligonucleotide
cccagatgccggtgctggaaagg

SEQ ID NO: 3992 - DNA, 23 bp, Artificial Sequence
  Description of Artificial Sequence: Synthetic oligonucleotide
gccggtgctggaaaggtccctgg

SEQ ID NO: 3993 - DNA, 23 bp, Artificial Sequence
  Description of Artificial Sequence: Synthetic oligonucleotide
aatatttgcttggaaagccaggg

SEQ ID NO: 3994 - DNA, 23 bp, Artificial Sequence
  Description of Artificial Sequence: Synthetic oligonucleotide
aaatatttgcttggaaagccagg

SEQ ID NO: 3995 - DNA, 23 bp, Artificial Sequence
  Description of Artificial Sequence: Synthetic oligonucleotide
ccatgagataaatatttgcttgg

SEQ ID NO: 3996 - DNA, 23 bp, Artificial Sequence
  Description of Artificial Sequence: Synthetic oligonucleotide
ccaagcaaatatttatctcatgg

SEQ ID NO: 3997 - DNA, 23 bp, Artificial Sequence
  Description of Artificial Sequence: Synthetic oligonucleotide
aacatgagtcatactcacagagg

SEQ ID NO: 3998 - DNA, 23 bp, Artificial Sequence
  Description of Artificial Sequence: Synthetic oligonucleotide
gtcatactcacagaggagtatgg

SEQ ID NO: 3999 - DNA, 23 bp, Artificial Sequence
  Description of Artificial Sequence: Synthetic oligonucleotide
gggctccctggctgctgagaagg

SEQ ID NO: 4000 - DNA, 23 bp, Artificial Sequence
  Description of Artificial Sequence: Synthetic oligonucleotide
ttaactccttctcagcagccagg

SEQ ID NO: 4001 - DNA, 23 bp, Artificial Sequence
  Description of Artificial Sequence: Synthetic oligonucleotide
taactccttctcagcagccaggg

SEQ ID NO: 4002 - DNA, 23 bp, Artificial Sequence
  Description of Artificial Sequence: Synthetic oligonucleotide
gtctgggatgctgggctccctgg

SEQ ID NO: 4003 - DNA, 23 bp, Artificial Sequence
  Description of Artificial Sequence: Synthetic oligonucleotide
aatatgctgtctgggatgctggg

SEQ ID NO: 4004 - DNA, 23 bp, Artificial Sequence
  Description of Artificial Sequence: Synthetic oligonucleotide
aaatatgctgtctgggatgctgg

SEQ ID NO: 4005 - DNA, 23 bp, Artificial Sequence
  Description of Artificial Sequence: Synthetic oligonucleotide
ctgggttaaatatgctgtctggg

SEQ ID NO: 4006 - DNA, 23 bp, Artificial Sequence
  Description of Artificial Sequence: Synthetic oligonucleotide
tctgggttaaatatgctgtctgg

SEQ ID NO: 4007 - DNA, 23 bp, Artificial Sequence
  Description of Artificial Sequence: Synthetic oligonucleotide
agacagcatatttaacccagagg

SEQ ID NO: 4008 - DNA, 23 bp, Artificial Sequence
  Description of Artificial Sequence: Synthetic oligonucleotide
ccagcagtcagttggcctctggg

SEQ ID NO: 4009 - DNA, 23 bp, Artificial Sequence
  Description of Artificial Sequence: Synthetic oligonucleotide
cccagcagtcagttggcctctgg

SEQ ID NO: 4010 - DNA, 23 bp, Artificial Sequence
  Description of Artificial Sequence: Synthetic oligonucleotide
aatctgccccagcagtcagttgg

SEQ ID NO: 4011 - DNA, 23 bp, Artificial Sequence
  Description of Artificial Sequence: Synthetic oligonucleotide
cccagaggccaactgactgctgg

SEQ ID NO: 4012 - DNA, 23 bp, Artificial Sequence
  Description of Artificial Sequence: Synthetic oligonucleotide
ccagaggccaactgactgctggg

SEQ ID NO: 4013 - DNA, 23 bp, Artificial Sequence
  Description of Artificial Sequence: Synthetic oligonucleotide
cagaggccaactgactgctgggg

SEQ ID NO: 4014 - DNA, 23 bp, Artificial Sequence
  Description of Artificial Sequence: Synthetic oligonucleotide
tgactgctggggcagatttgtgg

SEQ ID NO: 4015 - DNA, 23 bp, Artificial Sequence
  Description of Artificial Sequence: Synthetic oligonucleotide
acaatctgtctaatggtcagagg

SEQ ID NO: 4016 - DNA, 23 bp, Artificial Sequence
  Description of Artificial Sequence: Synthetic oligonucleotide
gtgacccacaatctgtctaatgg

SEQ ID NO: 4017 - DNA, 23 bp, Artificial Sequence
  Description of Artificial Sequence: Synthetic oligonucleotide
tctgaccattagacagattgtgg

SEQ ID NO: 4018 - DNA, 23 bp, Artificial Sequence
  Description of Artificial Sequence: Synthetic oligonucleotide
ctgaccattagacagattgtggg

SEQ ID NO: 4019 - DNA, 23 bp, Artificial Sequence
  Description of Artificial Sequence: Synthetic oligonucleotide
tcacaacgttgagtatacagtgg

SEQ ID NO: 4020 - DNA, 23 bp, Artificial Sequence
  Description of Artificial Sequence: Synthetic oligonucleotide
cacaacgttgagtatacagtggg

SEQ ID NO: 4021 - DNA, 23 bp, Artificial Sequence
  Description of Artificial Sequence: Synthetic oligonucleotide
cttaataagtgcttattccctgg

SEQ ID NO: 4022 - DNA, 23 bp, Artificial Sequence
  Description of Artificial Sequence: Synthetic oligonucleotide
ttaataagtgcttattccctggg

SEQ ID NO: 4023 - DNA, 23 bp, Artificial Sequence
  Description of Artificial Sequence: Synthetic oligonucleotide
taagtgcttattccctgggcagg

SEQ ID NO: 4024 - DNA, 23 bp, Artificial Sequence
  Description of Artificial Sequence: Synthetic oligonucleotide
aagtgcttattccctgggcaggg

SEQ ID NO: 4025 - DNA, 23 bp, Artificial Sequence
  Description of Artificial Sequence: Synthetic oligonucleotide
aatgaagaactccctgcccaggg

SEQ ID NO: 4026 - DNA, 23 bp, Artificial Sequence
  Description of Artificial Sequence: Synthetic oligonucleotide
aaatgaagaactccctgcccagg

SEQ ID NO: 4027 - DNA, 23 bp, Artificial Sequence
  Description of Artificial Sequence: Synthetic oligonucleotide
ggcagggagttcttcatttcagg

SEQ ID NO: 4028 - DNA, 23 bp, Artificial Sequence
  Description of Artificial Sequence: Synthetic oligonucleotide
gcagggagttcttcatttcaggg

SEQ ID NO: 4029 - DNA, 23 bp, Artificial Sequence
  Description of Artificial Sequence: Synthetic oligonucleotide
cagggagttcttcatttcagggg

SEQ ID NO: 4030 - DNA, 23 bp, Artificial Sequence
  Description of Artificial Sequence: Synthetic oligonucleotide
cccagaggagaagatgtaagtgg

SEQ ID NO: 4031 - DNA, 23 bp, Artificial Sequence
  Description of Artificial Sequence: Synthetic oligonucleotide
accacttacatcttctcctctgg

SEQ ID NO: 4032 - DNA, 23 bp, Artificial Sequence
  Description of Artificial Sequence: Synthetic oligonucleotide
ccacttacatcttctcctctggg

SEQ ID NO: 4033 - DNA, 23 bp, Artificial Sequence
  Description of Artificial Sequence: Synthetic oligonucleotide
cctggtcaaggagggcccagagg

SEQ ID NO: 4034 - DNA, 23 bp, Artificial Sequence
  Description of Artificial Sequence: Synthetic oligonucleotide
gtaattagcctggtcaaggaggg

SEQ ID NO: 4035 - DNA, 23 bp, Artificial Sequence
  Description of Artificial Sequence: Synthetic oligonucleotide
ggtaattagcctggtcaaggagg

SEQ ID NO: 4036 - DNA, 23 bp, Artificial Sequence
  Description of Artificial Sequence: Synthetic oligonucleotide
cctctgggccctccttgaccagg

SEQ ID NO: 4037 - DNA, 23 bp, Artificial Sequence
  Description of Artificial Sequence: Synthetic oligonucleotide
aatggtaattagcctggtcaagg

SEQ ID NO: 4038 - DNA, 23 bp, Artificial Sequence
  Description of Artificial Sequence: Synthetic oligonucleotide
cccaagaatggtaattagcctgg

SEQ ID NO: 4039 - DNA, 23 bp, Artificial Sequence
  Description of Artificial Sequence: Synthetic oligonucleotide
accaggctaattaccattcttgg

SEQ ID NO: 4040 - DNA, 23 bp, Artificial Sequence
  Description of Artificial Sequence: Synthetic oligonucleotide
ccaggctaattaccattcttggg

SEQ ID NO: 4041 - DNA, 23 bp, Artificial Sequence
  Description of Artificial Sequence: Synthetic oligonucleotide
gatagagttaatcccaagaatgg

SEQ ID NO: 4042 - DNA, 23 bp, Artificial Sequence
  Description of Artificial Sequence: Synthetic oligonucleotide
ttagccagcctttgatttgcagg

SEQ ID NO: 4043 - DNA, 23 bp, Artificial Sequence
  Description of Artificial Sequence: Synthetic oligonucleotide
gtaagtgtcctgcaaatcaaagg

SEQ ID NO: 4044 - DNA, 23 bp, Artificial Sequence
  Description of Artificial Sequence: Synthetic oligonucleotide
gtgtcctgcaaatcaaaggctgg

SEQ ID NO: 4045 - DNA, 23 bp, Artificial Sequence
  Description of Artificial Sequence: Synthetic oligonucleotide
aaggctggctaaatttccccagg

SEQ ID NO: 4046 - DNA, 23 bp, Artificial Sequence
  Description of Artificial Sequence: Synthetic oligonucleotide
aggctggctaaatttccccaggg

SEQ ID NO: 4047 - DNA, 23 bp, Artificial Sequence
  Description of Artificial Sequence: Synthetic oligonucleotide
tggctaaatttccccagggcagg

SEQ ID NO: 4048 - DNA, 23 bp, Artificial Sequence
  Description of Artificial Sequence: Synthetic oligonucleotide
tgtcctggagccctgccctgggg

SEQ ID NO: 4049 - DNA, 23 bp, Artificial Sequence
  Description of Artificial Sequence: Synthetic oligonucleotide
ggctaaatttccccagggcaggg

SEQ ID NO: 4050 - DNA, 23 bp, Artificial Sequence
  Description of Artificial Sequence: Synthetic oligonucleotide
atgtcctggagccctgccctggg

SEQ ID NO: 4051 - DNA, 23 bp, Artificial Sequence
  Description of Artificial Sequence: Synthetic oligonucleotide
tatgtcctggagccctgccctgg

SEQ ID NO: 4052 - DNA, 23 bp, Artificial Sequence
  Description of Artificial Sequence: Synthetic oligonucleotide
tttccccagggcagggctccagg

SEQ ID NO: 4053 - DNA, 23 bp, Artificial Sequence
  Description of Artificial Sequence: Synthetic oligonucleotide
cctgggggtgagatatgtcctgg

SEQ ID NO: 4054 - DNA, 23 bp, Artificial Sequence
  Description of Artificial Sequence: Synthetic oligonucleotide
ccaggacatatctcacccccagg

SEQ ID NO: 4055 - DNA, 23 bp, Artificial Sequence
  Description of Artificial Sequence: Synthetic oligonucleotide
gacatatctcacccccaggatgg

SEQ ID NO: 4056 - DNA, 23 bp, Artificial Sequence
  Description of Artificial Sequence: Synthetic oligonucleotide
tgtgtataattccatcctggggg

SEQ ID NO: 4057 - DNA, 23 bp, Artificial Sequence
  Description of Artificial Sequence: Synthetic oligonucleotide
gtgtgtataattccatcctgggg

SEQ ID NO: 4058 - DNA, 23 bp, Artificial Sequence
  Description of Artificial Sequence: Synthetic oligonucleotide
tgtgtgtataattccatcctggg

SEQ ID NO: 4059 - DNA, 23 bp, Artificial Sequence
  Description of Artificial Sequence: Synthetic oligonucleotide
gtgtgtgtataattccatcctgg

SEQ ID NO: 4060 - DNA, 23 bp, Artificial Sequence
  Description of Artificial Sequence: Synthetic oligonucleotide
agattcgggctgcaacttgaagg

SEQ ID NO: 4061 - DNA, 23 bp, Artificial Sequence
  Description of Artificial Sequence: Synthetic oligonucleotide
cgaattacactcagagattcggg

SEQ ID NO: 4062 - DNA, 23 bp, Artificial Sequence
  Description of Artificial Sequence: Synthetic oligonucleotide
acgaattacactcagagattcgg

SEQ ID NO: 4063 - DNA, 23 bp, Artificial Sequence
  Description of Artificial Sequence: Synthetic oligonucleotide
ttctcttttctctttttctttgg

SEQ ID NO: 4064 - DNA, 23 bp, Artificial Sequence
  Description of Artificial Sequence: Synthetic oligonucleotide
agaaaaagagaaaagagaagagg

SEQ ID NO: 4065 - DNA, 23 bp, Artificial Sequence
  Description of Artificial Sequence: Synthetic oligonucleotide
gaaaaagagaaaagagaagaggg

SEQ ID NO: 4066 - DNA, 23 bp, Artificial Sequence
  Description of Artificial Sequence: Synthetic oligonucleotide
gaaaagagaagagggtcttcagg

SEQ ID NO: 4067 - DNA, 23 bp, Artificial Sequence
  Description of Artificial Sequence: Synthetic oligonucleotide
aaaagagaagagggtcttcaggg

SEQ ID NO: 4068 - DNA, 23 bp, Artificial Sequence
  Description of Artificial Sequence: Synthetic oligonucleotide
gctctattcccttgtaaatctgg

SEQ ID NO: 4069 - DNA, 23 bp, Artificial Sequence
  Description of Artificial Sequence: Synthetic oligonucleotide
taagaacttccagatttacaagg

SEQ ID NO: 4070 - DNA, 23 bp, Artificial Sequence
  Description of Artificial Sequence: Synthetic oligonucleotide
aagaacttccagatttacaaggg

SEQ ID NO: 4071 - DNA, 23 bp, Artificial Sequence
  Description of Artificial Sequence: Synthetic oligonucleotide
agggaatagagcatctgatttgg

SEQ ID NO: 4072 - DNA, 23 bp, Artificial Sequence
  Description of Artificial Sequence: Synthetic oligonucleotide
tctgatttggcatctgagagagg

SEQ ID NO: 4073 - DNA, 23 bp, Artificial Sequence
  Description of Artificial Sequence: Synthetic oligonucleotide
cctacaacctccttaagagaagg

SEQ ID NO: 4074 - DNA, 23 bp, Artificial Sequence
  Description of Artificial Sequence: Synthetic oligonucleotide
attagatcttccttctcttaagg

SEQ ID NO: 4075 - DNA, 23 bp, Artificial Sequence
  Description of Artificial Sequence: Synthetic oligonucleotide
agatcttccttctcttaaggagg

SEQ ID NO: 4076 - DNA, 23 bp, Artificial Sequence
  Description of Artificial Sequence: Synthetic oligonucleotide
ccttctcttaaggaggttgtagg

SEQ ID NO: 4077 - DNA, 23 bp, Artificial Sequence
  Description of Artificial Sequence: Synthetic oligonucleotide
cctgggtttggggggtgggatgg

SEQ ID NO: 4078 - DNA, 23 bp, Artificial Sequence
  Description of Artificial Sequence: Synthetic oligonucleotide
aagccctgggtttggggggtggg

SEQ ID NO: 4079 - DNA, 23 bp, Artificial Sequence
  Description of Artificial Sequence: Synthetic oligonucleotide
gaagccctgggtttggggggtgg

SEQ ID NO: 4080 - DNA, 23 bp, Artificial Sequence
  Description of Artificial Sequence: Synthetic oligonucleotide
agtgaagccctgggtttgggggg

SEQ ID NO: 4081 - DNA, 23 bp, Artificial Sequence
  Description of Artificial Sequence: Synthetic oligonucleotide
cagtgaagccctgggtttggggg

SEQ ID NO: 4082 - DNA, 23 bp, Artificial Sequence
  Description of Artificial Sequence: Synthetic oligonucleotide
tcagtgaagccctgggtttgggg

SEQ ID NO: 4083 - DNA, 23 bp, Artificial Sequence
  Description of Artificial Sequence: Synthetic oligonucleotide
ccatcccaccccccaaacccagg

SEQ ID NO: 4084 - DNA, 23 bp, Artificial Sequence
  Description of Artificial Sequence: Synthetic oligonucleotide
ctcagtgaagccctgggtttggg

SEQ ID NO: 4085 - DNA, 23 bp, Artificial Sequence
  Description of Artificial Sequence: Synthetic oligonucleotide
catcccaccccccaaacccaggg

SEQ ID NO: 4086 - DNA, 23 bp, Artificial Sequence
  Description of Artificial Sequence: Synthetic oligonucleotide
actcagtgaagccctgggtttgg

SEQ ID NO: 4087 - DNA, 23 bp, Artificial Sequence
  Description of Artificial Sequence: Synthetic oligonucleotide
gtacaactcagtgaagccctggg

SEQ ID NO: 4088 - DNA, 23 bp, Artificial Sequence
  Description of Artificial Sequence: Synthetic oligonucleotide
ggtacaactcagtgaagccctgg

SEQ ID NO: 4089 - DNA, 23 bp, Artificial Sequence
  Description of Artificial Sequence: Synthetic oligonucleotide
tcttgggatggtctggttcatgg

SEQ ID NO: 4090 - DNA, 23 bp, Artificial Sequence
  Description of Artificial Sequence: Synthetic oligonucleotide
aaaagcctcttgggatggtctgg

SEQ ID NO: 4091 - DNA, 23 bp, Artificial Sequence
  Description of Artificial Sequence: Synthetic oligonucleotide
actcaaaaagcctcttgggatgg

SEQ ID NO: 4092 - DNA, 23 bp, Artificial Sequence
  Description of Artificial Sequence: Synthetic oligonucleotide
atgaaccagaccatcccaagagg

SEQ ID NO: 4093 - DNA, 23 bp, Artificial Sequence
  Description of Artificial Sequence: Synthetic oligonucleotide
cagaactcaaaaagcctcttggg

SEQ ID NO: 4094 - DNA, 23 bp, Artificial Sequence
  Description of Artificial Sequence: Synthetic oligonucleotide
tcagaactcaaaaagcctcttgg

SEQ ID NO: 4095 - DNA, 23 bp, Artificial Sequence
  Description of Artificial Sequence: Synthetic oligonucleotide
tcaatgtgcagagcaagggaagg

SEQ ID NO: 4096 - DNA, 23 bp, Artificial Sequence
  Description of Artificial Sequence: Synthetic oligonucleotide
atcatcaatgtgcagagcaaggg

SEQ ID NO: 4097 - DNA, 23 bp, Artificial Sequence
  Description of Artificial Sequence: Synthetic oligonucleotide
tatcatcaatgtgcagagcaagg

SEQ ID NO: 4098 - DNA, 23 bp, Artificial Sequence
  Description of Artificial Sequence: Synthetic oligonucleotide
ctcggctggctatctgctttagg

SEQ ID NO: 4099 - DNA, 23 bp, Artificial Sequence
  Description of Artificial Sequence: Synthetic oligonucleotide
ggagatttctggagctcggctgg

SEQ ID NO: 4100 - DNA, 23 bp, Artificial Sequence
  Description of Artificial Sequence: Synthetic oligonucleotide
ccagggagatttctggagctcgg

SEQ ID NO: 4101 - DNA, 23 bp, Artificial Sequence
  Description of Artificial Sequence: Synthetic oligonucleotide
ggtgcagccagggagatttctgg

SEQ ID NO: 4102 - DNA, 23 bp, Artificial Sequence
  Description of Artificial Sequence: Synthetic oligonucleotide
ccgagctccagaaatctccctgg

SEQ ID NO: 4103 - DNA, 23 bp, Artificial Sequence
  Description of Artificial Sequence: Synthetic oligonucleotide
ggcctctgcaggtgcagccaggg

SEQ ID NO: 4104 - DNA, 23 bp, Artificial Sequence
  Description of Artificial Sequence: Synthetic oligonucleotide
tggcctctgcaggtgcagccagg

SEQ ID NO: 4105 - DNA, 23 bp, Artificial Sequence
  Description of Artificial Sequence: Synthetic oligonucleotide
ctccctggctgcacctgcagagg

SEQ ID NO: 4106 - DNA, 23 bp, Artificial Sequence
  Description of Artificial Sequence: Synthetic oligonucleotide
gaggggtcagtggcctctgcagg

SEQ ID NO: 4107 - DNA, 23 bp, Artificial Sequence
  Description of Artificial Sequence: Synthetic oligonucleotide
tccctccacagaggggtcagtgg

SEQ ID NO: 4108 - DNA, 23 bp, Artificial Sequence
  Description of Artificial Sequence: Synthetic oligonucleotide
agaggccactgacccctctgtgg

SEQ ID NO: 4109 - DNA, 23 bp, Artificial Sequence
  Description of Artificial Sequence: Synthetic oligonucleotide
agagcggtccctccacagagggg

SEQ ID NO: 4110 - DNA, 23 bp, Artificial Sequence
  Description of Artificial Sequence: Synthetic oligonucleotide
aagagcggtccctccacagaggg

SEQ ID NO: 4111 - DNA, 23 bp, Artificial Sequence
  Description of Artificial Sequence: Synthetic oligonucleotide
ggccactgacccctctgtggagg

SEQ ID NO: 4112 - DNA, 23 bp, Artificial Sequence
  Description of Artificial Sequence: Synthetic oligonucleotide
gaagagcggtccctccacagagg

SEQ ID NO: 4113 - DNA, 23 bp, Artificial Sequence
  Description of Artificial Sequence: Synthetic oligonucleotide
gccactgacccctctgtggaggg

SEQ ID NO: 4114 - DNA, 23 bp, Artificial Sequence
  Description of Artificial Sequence: Synthetic oligonucleotide
gccagccacacactgaagagcgg

SEQ ID NO: 4115 - DNA, 23 bp, Artificial Sequence
  Description of Artificial Sequence: Synthetic oligonucleotide
agggaccgctcttcagtgtgtgg

SEQ ID NO: 4116 - DNA, 23 bp, Artificial Sequence
  Description of Artificial Sequence: Synthetic oligonucleotide
accgctcttcagtgtgtggctgg

SEQ ID NO: 4117 - DNA, 23 bp, Artificial Sequence
  Description of Artificial Sequence: Synthetic oligonucleotide
tactctctgctcctctctcttgg

SEQ ID NO: 4118 - DNA, 23 bp, Artificial Sequence
  Description of Artificial Sequence: Synthetic oligonucleotide
atggctgaagaccaagagagagg

SEQ ID NO: 4119 - DNA, 23 bp, Artificial Sequence
  Description of Artificial Sequence: Synthetic oligonucleotide
agaaactggtgagcaatggatgg

SEQ ID NO: 4120 - DNA, 23 bp, Artificial Sequence
  Description of Artificial Sequence: Synthetic oligonucleotide
cgtgagaaactggtgagcaatgg

SEQ ID NO: 4121 - DNA, 23 bp, Artificial Sequence
  Description of Artificial Sequence: Synthetic oligonucleotide
ctatgctcctcgtgagaaactgg

SEQ ID NO: 4122 - DNA, 23 bp, Artificial Sequence
  Description of Artificial Sequence: Synthetic oligonucleotide
ttgctcaccagtttctcacgagg

SEQ ID NO: 4123 - DNA, 23 bp, Artificial Sequence
  Description of Artificial Sequence: Synthetic oligonucleotide
cagtttctcacgaggagcatagg

SEQ ID NO: 4124 - DNA, 23 bp, Artificial Sequence
  Description of Artificial Sequence: Synthetic oligonucleotide
gcataggaagatatgcatgtagg

SEQ ID NO: 4125 - DNA, 23 bp, Artificial Sequence
  Description of Artificial Sequence: Synthetic oligonucleotide
cataggaagatatgcatgtaggg

SEQ ID NO: 4126 - DNA, 23 bp, Artificial Sequence
  Description of Artificial Sequence: Synthetic oligonucleotide
aggaagatatgcatgtagggagg

SEQ ID NO: 4127 - DNA, 23 bp, Artificial Sequence
  Description of Artificial Sequence: Synthetic oligonucleotide
agatatgcatgtagggaggtagg

SEQ ID NO: 4128 - DNA, 23 bp, Artificial Sequence
  Description of Artificial Sequence: Synthetic oligonucleotide
tgcatgtagggaggtaggcacgg

SEQ ID NO: 4129 - DNA, 23 bp, Artificial Sequence
  Description of Artificial Sequence: Synthetic oligonucleotide
gcatgtagggaggtaggcacggg

SEQ ID NO: 4130 - DNA, 23 bp, Artificial Sequence
  Description of Artificial Sequence: Synthetic oligonucleotide
catgtagggaggtaggcacgggg

SEQ ID NO: 4131 - DNA, 23 bp, Artificial Sequence
  Description of Artificial Sequence: Synthetic oligonucleotide
atgacttgtttgactttagcagg

SEQ ID NO: 4132 - DNA, 23 bp, Artificial Sequence
  Description of Artificial Sequence: Synthetic oligonucleotide
ttcaagaatctcctcgcacctgg

SEQ ID NO: 4133 - DNA, 23 bp, Artificial Sequence
  Description of Artificial Sequence: Synthetic oligonucleotide
agcatctgaaaccaggtgcgagg

SEQ ID NO: 4134 - DNA, 23 bp, Artificial Sequence
  Description of Artificial Sequence: Synthetic oligonucleotide
ggaccccagcatctgaaaccagg

SEQ ID NO: 4135 - DNA, 23 bp, Artificial Sequence
  Description of Artificial Sequence: Synthetic oligonucleotide
tcgcacctggtttcagatgctgg

SEQ ID NO: 4136 - DNA, 23 bp, Artificial Sequence
  Description of Artificial Sequence: Synthetic oligonucleotide
cgcacctggtttcagatgctggg

SEQ ID NO: 4137 - DNA, 23 bp, Artificial Sequence
  Description of Artificial Sequence: Synthetic oligonucleotide
gcacctggtttcagatgctgggg

SEQ ID NO: 4138 - DNA, 23 bp, Artificial Sequence
  Description of Artificial Sequence: Synthetic oligonucleotide
cacagaagcctgtgacagacagg

SEQ ID NO: 4139 - DNA, 23 bp, Artificial Sequence
  Description of Artificial Sequence: Synthetic oligonucleotide
gctggggtcctgtctgtcacagg

SEQ ID NO: 4140 - DNA, 23 bp, Artificial Sequence
  Description of Artificial Sequence: Synthetic oligonucleotide
gacaaactcaagggggtaggagg

SEQ ID NO: 4141 - DNA, 23 bp, Artificial Sequence
  Description of Artificial Sequence: Synthetic oligonucleotide
tgtgacaaactcaagggggtagg

SEQ ID NO: 4142 - DNA, 23 bp, Artificial Sequence
  Description of Artificial Sequence: Synthetic oligonucleotide
gccatgtgacaaactcaaggggg

SEQ ID NO: 4143 - DNA, 23 bp, Artificial Sequence
  Description of Artificial Sequence: Synthetic oligonucleotide
ggccatgtgacaaactcaagggg

SEQ ID NO: 4144 - DNA, 23 bp, Artificial Sequence
  Description of Artificial Sequence: Synthetic oligonucleotide
gggccatgtgacaaactcaaggg

SEQ ID NO: 4145 - DNA, 23 bp, Artificial Sequence
  Description of Artificial Sequence: Synthetic oligonucleotide
agggccatgtgacaaactcaagg

SEQ ID NO: 4146 - DNA, 23 bp, Artificial Sequence
  Description of Artificial Sequence: Synthetic oligonucleotide
acccccttgagtttgtcacatgg

SEQ ID NO: 4147 - DNA, 23 bp, Artificial Sequence
  Description of Artificial Sequence: Synthetic oligonucleotide
agtttgtcacatggcccttcagg

SEQ ID NO: 4148 - DNA, 23 bp, Artificial Sequence
  Description of Artificial Sequence: Synthetic oligonucleotide
ctatctcaggccttcctgaaggg

SEQ ID NO: 4149 - DNA, 23 bp, Artificial Sequence
  Description of Artificial Sequence: Synthetic oligonucleotide
tgtcacatggcccttcaggaagg

SEQ ID NO: 4150 - DNA, 23 bp, Artificial Sequence
  Description of Artificial Sequence: Synthetic oligonucleotide
tctatctcaggccttcctgaagg

SEQ ID NO: 4151 - DNA, 23 bp, Artificial Sequence
  Description of Artificial Sequence: Synthetic oligonucleotide
acccagggcaaatctatctcagg

SEQ ID NO: 4152 - DNA, 23 bp, Artificial Sequence
  Description of Artificial Sequence: Synthetic oligonucleotide
ggcctgagatagatttgccctgg

SEQ ID NO: 4153 - DNA, 23 bp, Artificial Sequence
  Description of Artificial Sequence: Synthetic oligonucleotide
gcctgagatagatttgccctggg

SEQ ID NO: 4154 - DNA, 23 bp, Artificial Sequence
  Description of Artificial Sequence: Synthetic oligonucleotide
tgagatagatttgccctgggtgg

SEQ ID NO: 4155 - DNA, 23 bp, Artificial Sequence
  Description of Artificial Sequence: Synthetic oligonucleotide
gagatagatttgccctgggtggg

SEQ ID NO: 4156 - DNA, 23 bp, Artificial Sequence
  Description of Artificial Sequence: Synthetic oligonucleotide
tctcataggaggcccacccaggg

SEQ ID NO: 4157 - DNA, 23 bp, Artificial Sequence
  Description of Artificial Sequence: Synthetic oligonucleotide
ttctcataggaggcccacccagg

SEQ ID NO: 4158 - DNA, 23 bp, Artificial Sequence
  Description of Artificial Sequence: Synthetic oligonucleotide
acttaagattttctcataggagg

SEQ ID NO: 4159 - DNA, 23 bp, Artificial Sequence
  Description of Artificial Sequence: Synthetic oligonucleotide
ctcacttaagattttctcatagg

SEQ ID NO: 4160 - DNA, 23 bp, Artificial Sequence
  Description of Artificial Sequence: Synthetic oligonucleotide
ctatgagaaaatcttaagtgagg

SEQ ID NO: 4161 - DNA, 23 bp, Artificial Sequence
  Description of Artificial Sequence: Synthetic oligonucleotide
aaatcttaagtgaggcacccagg

SEQ ID NO: 4162 - DNA, 23 bp, Artificial Sequence
  Description of Artificial Sequence: Synthetic oligonucleotide
aggctctttccattttgcctggg

SEQ ID NO: 4163 - DNA, 23 bp, Artificial Sequence
  Description of Artificial Sequence: Synthetic oligonucleotide
aaggctctttccattttgcctgg

SEQ ID NO: 4164 - DNA, 23 bp, Artificial Sequence
  Description of Artificial Sequence: Synthetic oligonucleotide
agtgaggcacccaggcaaaatgg

SEQ ID NO: 4165 - DNA, 23 bp, Artificial Sequence
  Description of Artificial Sequence: Synthetic oligonucleotide
ggcttcctgctctgggcaaaagg

SEQ ID NO: 4166 - DNA, 23 bp, Artificial Sequence
  Description of Artificial Sequence: Synthetic oligonucleotide
aagagccttttgcccagagcagg

SEQ ID NO: 4167 - DNA, 23 bp, Artificial Sequence
  Description of Artificial Sequence: Synthetic oligonucleotide
gaagacaggcttcctgctctggg

SEQ ID NO: 4168 - DNA, 23 bp, Artificial Sequence
  Description of Artificial Sequence: Synthetic oligonucleotide
ggaagacaggcttcctgctctgg

SEQ ID NO: 4169 - DNA, 23 bp, Artificial Sequence
  Description of Artificial Sequence: Synthetic oligonucleotide
aacagctggaaatggaagacagg

SEQ ID NO: 4170 - DNA, 23 bp, Artificial Sequence
  Description of Artificial Sequence: Synthetic oligonucleotide
gtaggtggaacagctggaaatgg

SEQ ID NO: 4171 - DNA, 23 bp, Artificial Sequence
  Description of Artificial Sequence: Synthetic oligonucleotide
agctaagtaggtggaacagctgg

SEQ ID NO: 4172 - DNA, 23 bp, Artificial Sequence
  Description of Artificial Sequence: Synthetic oligonucleotide
cctcttttaagctaagtaggtgg

SEQ ID NO: 4173 - DNA, 23 bp, Artificial Sequence
  Description of Artificial Sequence: Synthetic oligonucleotide
gtgcctcttttaagctaagtagg

SEQ ID NO: 4174 - DNA, 23 bp, Artificial Sequence
  Description of Artificial Sequence: Synthetic oligonucleotide
ccacctacttagcttaaaagagg

SEQ ID NO: 4175 - DNA, 23 bp, Artificial Sequence
  Description of Artificial Sequence: Synthetic oligonucleotide
ctgagactgagactgaagacagg

SEQ ID NO: 4176 - DNA, 23 bp, Artificial Sequence
  Description of Artificial Sequence: Synthetic oligonucleotide
agtctcagtctcctcttctgtgg

SEQ ID NO: 4177 - DNA, 23 bp, Artificial Sequence
  Description of Artificial Sequence: Synthetic oligonucleotide
attgtcccattccacagaagagg

SEQ ID NO: 4178 - DNA, 23 bp, Artificial Sequence
  Description of Artificial Sequence: Synthetic oligonucleotide
cagtctcctcttctgtggaatgg

SEQ ID NO: 4179 - DNA, 23 bp, Artificial Sequence
  Description of Artificial Sequence: Synthetic oligonucleotide
agtctcctcttctgtggaatggg

SEQ ID NO: 4180 - DNA, 23 bp, Artificial Sequence
  Description of Artificial Sequence: Synthetic oligonucleotide
cctcacagcagtgtatgataagg

SEQ ID NO: 4181 - DNA, 23 bp, Artificial Sequence
  Description of Artificial Sequence: Synthetic oligonucleotide
ccttatcatacactgctgtgagg

SEQ ID NO: 4182 - DNA, 23 bp, Artificial Sequence
  Description of Artificial Sequence: Synthetic oligonucleotide
acactgctgtgaggactgagtgg

SEQ ID NO: 4183 - DNA, 23 bp, Artificial Sequence
  Description of Artificial Sequence: Synthetic oligonucleotide
gcaaagtgctaaatccacacagg

SEQ ID NO: 4184 - DNA, 23 bp, Artificial Sequence
  Description of Artificial Sequence: Synthetic oligonucleotide
attaattcaaatctcctgtgtgg

SEQ ID NO: 4185 - DNA, 23 bp, Artificial Sequence
  Description of Artificial Sequence: Synthetic oligonucleotide
ttgacagaccttcagtgtggtgg

SEQ ID NO: 4186 - DNA, 23 bp, Artificial Sequence
  Description of Artificial Sequence: Synthetic oligonucleotide
gaattaatccaccacactgaagg

SEQ ID NO: 4187 - DNA, 23 bp, Artificial Sequence
  Description of Artificial Sequence: Synthetic oligonucleotide
cccttgacagaccttcagtgtgg

SEQ ID NO: 4188 - DNA, 23 bp, Artificial Sequence
  Description of Artificial Sequence: Synthetic oligonucleotide
accacactgaaggtctgtcaagg

SEQ ID NO: 4189 - DNA, 23 bp, Artificial Sequence
  Description of Artificial Sequence: Synthetic oligonucleotide
ccacactgaaggtctgtcaaggg

SEQ ID NO: 4190 - DNA, 23 bp, Artificial Sequence
  Description of Artificial Sequence: Synthetic oligonucleotide
actgaaggtctgtcaagggcagg

SEQ ID NO: 4191 - DNA, 23 bp, Artificial Sequence
  Description of Artificial Sequence: Synthetic oligonucleotide
ctgaaggtctgtcaagggcaggg

SEQ ID NO: 4192 - DNA, 23 bp, Artificial Sequence
  Description of Artificial Sequence: Synthetic oligonucleotide
gtgttagactggggatactctgg

SEQ ID NO: 4193 - DNA, 23 bp, Artificial Sequence
  Description of Artificial Sequence: Synthetic oligonucleotide
ccaagtcctgtgttagactgggg

SEQ ID NO: 4194 - DNA, 23 bp, Artificial Sequence
  Description of Artificial Sequence: Synthetic oligonucleotide
gccaagtcctgtgttagactggg

SEQ ID NO: 4195 - DNA, 23 bp, Artificial Sequence
  Description of Artificial Sequence: Synthetic oligonucleotide
tgccaagtcctgtgttagactgg

SEQ ID NO: 4196 - DNA, 23 bp, Artificial Sequence
  Description of Artificial Sequence: Synthetic oligonucleotide
gagtatccccagtctaacacagg

SEQ ID NO: 4197 - DNA, 23 bp, Artificial Sequence
  Description of Artificial Sequence: Synthetic oligonucleotide
ccccagtctaacacaggacttgg

SEQ ID NO: 4198 - DNA, 23 bp, Artificial Sequence
  Description of Artificial Sequence: Synthetic oligonucleotide
gcatatgaaaagtgttcagtagg

SEQ ID NO: 4199 - DNA, 23 bp, Artificial Sequence
  Description of Artificial Sequence: Synthetic oligonucleotide
atgaaaagtgttcagtaggccgg

SEQ ID NO: 4200 - DNA, 23 bp, Artificial Sequence
  Description of Artificial Sequence: Synthetic oligonucleotide
tgaaaagtgttcagtaggccggg

SEQ ID NO: 4201 - DNA, 23 bp, Artificial Sequence
  Description of Artificial Sequence: Synthetic oligonucleotide
caggcatgagccactgcacccgg

SEQ ID NO: 4202 - DNA, 23 bp, Artificial Sequence
  Description of Artificial Sequence: Synthetic oligonucleotide
gttcagtaggccgggtgcagtgg

SEQ ID NO: 4203 - DNA, 23 bp, Artificial Sequence
  Description of Artificial Sequence: Synthetic oligonucleotide
tcccaaagtgctgggattacagg

SEQ ID NO: 4204 - DNA, 23 bp, Artificial Sequence
  Description of Artificial Sequence: Synthetic oligonucleotide
ctttggcctcccaaagtgctggg

SEQ ID NO: 4205 - DNA, 23 bp, Artificial Sequence
  Description of Artificial Sequence: Synthetic oligonucleotide
tgcctgtaatcccagcactttgg

SEQ ID NO: 4206 - DNA, 23 bp, Artificial Sequence
  Description of Artificial Sequence: Synthetic oligonucleotide
actttggcctcccaaagtgctgg

SEQ ID NO: 4207 - DNA, 23 bp, Artificial Sequence
  Description of Artificial Sequence: Synthetic oligonucleotide
gcctgtaatcccagcactttggg

SEQ ID NO: 4208 - DNA, 23 bp, Artificial Sequence
  Description of Artificial Sequence: Synthetic oligonucleotide
tgtaatcccagcactttgggagg

SEQ ID NO: 4209 - DNA, 23 bp, Artificial Sequence
  Description of Artificial Sequence: Synthetic oligonucleotide
agcactttgggaggccaaagtgg

SEQ ID NO: 4210 - DNA, 23 bp, Artificial Sequence
  Description of Artificial Sequence: Synthetic oligonucleotide
gcactttgggaggccaaagtggg

SEQ ID NO: 4211 - DNA, 23 bp, Artificial Sequence
  Description of Artificial Sequence: Synthetic oligonucleotide
ctcagatgatccgcccactttgg

SEQ ID NO: 4212 - DNA, 23 bp, Artificial Sequence
  Description of Artificial Sequence: Synthetic oligonucleotide
ctttgggaggccaaagtgggcgg

SEQ ID NO: 4213 - DNA, 23 bp, Artificial Sequence
  Description of Artificial Sequence: Synthetic oligonucleotide
caaagtgggcggatcatctgagg

SEQ ID NO: 4214 - DNA, 23 bp, Artificial Sequence
  Description of Artificial Sequence: Synthetic oligonucleotide
tgggcggatcatctgaggtcagg

SEQ ID NO: 4215 - DNA, 23 bp, Artificial Sequence
  Description of Artificial Sequence: Synthetic oligonucleotide
tcaggagttcaagtccagcctgg

SEQ ID NO: 4216 - DNA, 23 bp, Artificial Sequence
  Description of Artificial Sequence: Synthetic oligonucleotide
tttcaccacgttggccaggctgg

SEQ ID NO: 4217 - DNA, 23 bp, Artificial Sequence
  Description of Artificial Sequence: Synthetic oligonucleotide
gtggtttcaccacgttggccagg

SEQ ID NO: 4218 - DNA, 23 bp, Artificial Sequence
  Description of Artificial Sequence: Synthetic oligonucleotide
caagtccagcctggccaacgtgg

SEQ ID NO: 4219 - DNA, 23 bp, Artificial Sequence
  Description of Artificial Sequence: Synthetic oligonucleotide
gagatgtggtttcaccacgttgg

SEQ ID NO: 4220 - DNA, 23 bp, Artificial Sequence
  Description of Artificial Sequence: Synthetic oligonucleotide
ttgtatttttagtagagatgtgg

SEQ ID NO: 4221 - DNA, 23 bp, Artificial Sequence
  Description of Artificial Sequence: Synthetic oligonucleotide
actaaaaatacaaaattagctgg

SEQ ID NO: 4222 - DNA, 23 bp, Artificial Sequence
  Description of Artificial Sequence: Synthetic oligonucleotide
ctaaaaatacaaaattagctggg

SEQ ID NO: 4223 - DNA, 23 bp, Artificial Sequence
  Description of Artificial Sequence: Synthetic oligonucleotide
aatacaaaattagctgggcgtgg

SEQ ID NO: 4224 - DNA, 23 bp, Artificial Sequence
  Description of Artificial Sequence: Synthetic oligonucleotide
acaaaattagctgggcgtggtgg

SEQ ID NO: 4225 - DNA, 23 bp, Artificial Sequence
  Description of Artificial Sequence: Synthetic oligonucleotide
tccagagtagctgtgattacagg

SEQ ID NO: 4226 - DNA, 23 bp, Artificial Sequence
  Description of Artificial Sequence: Synthetic oligonucleotide
gcctgtaatcacagctactctgg

SEQ ID NO: 4227 - DNA, 23 bp, Artificial Sequence
  Description of Artificial Sequence: Synthetic oligonucleotide
tgtaatcacagctactctggagg

SEQ ID NO: 4228 - DNA, 23 bp, Artificial Sequence
  Description of Artificial Sequence: Synthetic oligonucleotide
cacagctactctggaggctgagg

SEQ ID NO: 4229 - DNA, 23 bp, Artificial Sequence
  Description of Artificial Sequence: Synthetic oligonucleotide
gctactctggaggctgaggcagg

SEQ ID NO: 4230 - DNA, 23 bp, Artificial Sequence
  Description of Artificial Sequence: Synthetic oligonucleotide
caggagaatcacttgaacccagg

SEQ ID NO: 4231 - DNA, 23 bp, Artificial Sequence
  Description of Artificial Sequence: Synthetic oligonucleotide
gagaatcacttgaacccaggagg

SEQ ID NO: 4232 - DNA, 23 bp, Artificial Sequence
  Description of Artificial Sequence: Synthetic oligonucleotide
aatcacttgaacccaggaggcgg

SEQ ID NO: 4233 - DNA, 23 bp, Artificial Sequence
  Description of Artificial Sequence: Synthetic oligonucleotide
cactgcaacctccgcctcctggg

SEQ ID NO: 4234 - DNA, 23 bp, Artificial Sequence
  Description of Artificial Sequence: Synthetic oligonucleotide
tcactgcaacctccgcctcctgg

SEQ ID NO: 4235 - DNA, 23 bp, Artificial Sequence
  Description of Artificial Sequence: Synthetic oligonucleotide
cacttgaacccaggaggcggagg

SEQ ID NO: 4236 - DNA, 23 bp, Artificial Sequence
  Description of Artificial Sequence: Synthetic oligonucleotide
tcgcccaggctggagtgcagtgg

SEQ ID NO: 4237 - DNA, 23 bp, Artificial Sequence
  Description of Artificial Sequence: Synthetic oligonucleotide
catgccactgcactccagcctgg

SEQ ID NO: 4238 - DNA, 23 bp, Artificial Sequence
  Description of Artificial Sequence: Synthetic oligonucleotide
atgccactgcactccagcctggg

SEQ ID NO: 4239 - DNA, 23 bp, Artificial Sequence
  Description of Artificial Sequence: Synthetic oligonucleotide
ttcaatcttgtcgcccaggctgg

SEQ ID NO: 4240 - DNA, 23 bp, Artificial Sequence
  Description of Artificial Sequence: Synthetic oligonucleotide
gagtttcaatcttgtcgcccagg

SEQ ID NO: 4241 - DNA, 23 bp, Artificial Sequence
  Description of Artificial Sequence: Synthetic oligonucleotide
cttgttctttgtttttgagatgg

SEQ ID NO: 4242 - DNA, 23 bp, Artificial Sequence
  Description of Artificial Sequence: Synthetic oligonucleotide
catctcaaaaacaaagaacaagg

SEQ ID NO: 4243 - DNA, 23 bp, Artificial Sequence
  Description of Artificial Sequence: Synthetic oligonucleotide
ctaaaagaaaaacagagtagtgg

SEQ ID NO: 4244 - DNA, 23 bp, Artificial Sequence
  Description of Artificial Sequence: Synthetic oligonucleotide
gactggctgcagagtcagtgggg

SEQ ID NO: 4245 - DNA, 23 bp, Artificial Sequence
  Description of Artificial Sequence: Synthetic oligonucleotide
ggactggctgcagagtcagtggg

SEQ ID NO: 4246 - DNA, 23 bp, Artificial Sequence
  Description of Artificial Sequence: Synthetic oligonucleotide
aggactggctgcagagtcagtgg

SEQ ID NO: 4247 - DNA, 23 bp, Artificial Sequence
  Description of Artificial Sequence: Synthetic oligonucleotide
tgccacatgaagaaaaggactgg

SEQ ID NO: 4248 - DNA, 23 bp, Artificial Sequence
  Description of Artificial Sequence: Synthetic oligonucleotide
ccaactgccacatgaagaaaagg

SEQ ID NO: 4249 - DNA, 23 bp, Artificial Sequence
  Description of Artificial Sequence: Synthetic oligonucleotide
agccagtccttttcttcatgtgg

SEQ ID NO: 4250 - DNA, 23 bp, Artificial Sequence
  Description of Artificial Sequence: Synthetic oligonucleotide
ccttttcttcatgtggcagttgg

SEQ ID NO: 4251 - DNA, 23 bp, Artificial Sequence
  Description of Artificial Sequence: Synthetic oligonucleotide
tttcttcatgtggcagttggtgg

SEQ ID NO: 4252 - DNA, 23 bp, Artificial Sequence
  Description of Artificial Sequence: Synthetic oligonucleotide
cactctgcaatcagtcacatagg

SEQ ID NO: 4253 - DNA, 23 bp, Artificial Sequence
  Description of Artificial Sequence: Synthetic oligonucleotide
tgactgattgcagagtgaattgg

SEQ ID NO: 4254 - DNA, 23 bp, Artificial Sequence
  Description of Artificial Sequence: Synthetic oligonucleotide
gactgattgcagagtgaattggg

SEQ ID NO: 4255 - DNA, 23 bp, Artificial Sequence
  Description of Artificial Sequence: Synthetic oligonucleotide
cagagtgaattgggagctgttgg

SEQ ID NO: 4256 - DNA, 23 bp, Artificial Sequence
  Description of Artificial Sequence: Synthetic oligonucleotide
gttttgaatgcaccacactaagg

SEQ ID NO: 4257 - DNA, 23 bp, Artificial Sequence
  Description of Artificial Sequence: Synthetic oligonucleotide
tgtcctcacattccttagtgtgg

SEQ ID NO: 4258 - DNA, 23 bp, Artificial Sequence
  Description of Artificial Sequence: Synthetic oligonucleotide
gcaccacactaaggaatgtgagg

SEQ ID NO: 4259 - DNA, 23 bp, Artificial Sequence
  Description of Artificial Sequence: Synthetic oligonucleotide
tgaggacacattgctctttgcgg

SEQ ID NO: 4260 - DNA, 23 bp, Artificial Sequence
  Description of Artificial Sequence: Synthetic oligonucleotide
cgaggggagctaatatagctggg

SEQ ID NO: 4261 - DNA, 23 bp, Artificial Sequence
  Description of Artificial Sequence: Synthetic oligonucleotide
ccgaggggagctaatatagctgg

SEQ ID NO: 4262 - DNA, 23 bp, Artificial Sequence
  Description of Artificial Sequence: Synthetic oligonucleotide
ccagctatattagctcccctcgg

SEQ ID NO: 4263 - DNA, 23 bp, Artificial Sequence
  Description of Artificial Sequence: Synthetic oligonucleotide
aaaactgggctgtgtccgagggg

SEQ ID NO: 4264 - DNA, 23 bp, Artificial Sequence
  Description of Artificial Sequence: Synthetic oligonucleotide
gaaaactgggctgtgtccgaggg

SEQ ID NO: 4265 - DNA, 23 bp, Artificial Sequence
  Description of Artificial Sequence: Synthetic oligonucleotide
agaaaactgggctgtgtccgagg

SEQ ID NO: 4266 - DNA, 23 bp, Artificial Sequence
  Description of Artificial Sequence: Synthetic oligonucleotide
ccacgcgaatacagaaaactggg

SEQ ID NO: 4267 - DNA, 23 bp, Artificial Sequence
  Description of Artificial Sequence: Synthetic oligonucleotide
tccacgcgaatacagaaaactgg

SEQ ID NO: 4268 - DNA, 23 bp, Artificial Sequence
  Description of Artificial Sequence: Synthetic oligonucleotide
cccagttttctgtattcgcgtgg

SEQ ID NO: 4269 - DNA, 23 bp, Artificial Sequence
  Description of Artificial Sequence: Synthetic oligonucleotide
gaggagtgctgggaatcgcgcgg

SEQ ID NO: 4270 - DNA, 23 bp, Artificial Sequence
  Description of Artificial Sequence: Synthetic oligonucleotide
gatgctgtaagaggagtgctggg

SEQ ID NO: 4271 - DNA, 23 bp, Artificial Sequence
  Description of Artificial Sequence: Synthetic oligonucleotide
agatgctgtaagaggagtgctgg

SEQ ID NO: 4272 - DNA, 23 bp, Artificial Sequence
  Description of Artificial Sequence: Synthetic oligonucleotide
ctgaggtgagatgctgtaagagg

SEQ ID NO: 4273 - DNA, 23 bp, Artificial Sequence
  Description of Artificial Sequence: Synthetic oligonucleotide
gaggcaaggaacatacactgagg

SEQ ID NO: 4274 - DNA, 23 bp, Artificial Sequence
  Description of Artificial Sequence: Synthetic oligonucleotide
gttcaactgcactggaggcaagg

SEQ ID NO: 4275 - DNA, 23 bp, Artificial Sequence
  Description of Artificial Sequence: Synthetic oligonucleotide
ctgaggttcaactgcactggagg

SEQ ID NO: 4276 - DNA, 23 bp, Artificial Sequence
  Description of Artificial Sequence: Synthetic oligonucleotide
ggactgaggttcaactgcactgg

SEQ ID NO: 4277 - DNA, 23 bp, Artificial Sequence
  Description of Artificial Sequence: Synthetic oligonucleotide
catgaggagaggcaggactgagg

SEQ ID NO: 4278 - DNA, 23 bp, Artificial Sequence
  Description of Artificial Sequence: Synthetic oligonucleotide
atgcacacatgaggagaggcagg

SEQ ID NO: 4279 - DNA, 23 bp, Artificial Sequence
  Description of Artificial Sequence: Synthetic oligonucleotide
gtgaatgcacacatgaggagagg

SEQ ID NO: 4280 - DNA, 23 bp, Artificial Sequence
  Description of Artificial Sequence: Synthetic oligonucleotide
gaaaggtgaatgcacacatgagg

SEQ ID NO: 4281 - DNA, 23 bp, Artificial Sequence
  Description of Artificial Sequence: Synthetic oligonucleotide
atgtgtgcattcacctttcttgg

SEQ ID NO: 4282 - DNA, 23 bp, Artificial Sequence
  Description of Artificial Sequence: Synthetic oligonucleotide
tggggagagagcaccaagaaagg

SEQ ID NO: 4283 - DNA, 23 bp, Artificial Sequence
  Description of Artificial Sequence: Synthetic oligonucleotide
ttcttggtgctctctccccatgg

SEQ ID NO: 4284 - DNA, 23 bp, Artificial Sequence
  Description of Artificial Sequence: Synthetic oligonucleotide
tcttggtgctctctccccatggg

SEQ ID NO: 4285 - DNA, 23 bp, Artificial Sequence
  Description of Artificial Sequence: Synthetic oligonucleotide
atggtagaacttggcccatgggg

SEQ ID NO: 4286 - DNA, 23 bp, Artificial Sequence
  Description of Artificial Sequence: Synthetic oligonucleotide
catggtagaacttggcccatggg

SEQ ID NO: 4287 - DNA, 23 bp, Artificial Sequence
  Description of Artificial Sequence: Synthetic oligonucleotide
tcatggtagaacttggcccatgg

SEQ ID NO: 4288 - DNA, 23 bp, Artificial Sequence
  Description of Artificial Sequence: Synthetic oligonucleotide
tcataactcatggtagaacttgg

SEQ ID NO: 4289 - DNA, 23 bp, Artificial Sequence
  Description of Artificial Sequence: Synthetic oligonucleotide
ccataatgtttcataactcatgg

SEQ ID NO: 4290 - DNA, 23 bp, Artificial Sequence
  Description of Artificial Sequence: Synthetic oligonucleotide
ccatgagttatgaaacattatgg

SEQ ID NO: 4291 - DNA, 23 bp, Artificial Sequence
  Description of Artificial Sequence: Synthetic oligonucleotide
ttatggagaaaacatgtctttgg

SEQ ID NO: 4292 - DNA, 23 bp, Artificial Sequence
  Description of Artificial Sequence: Synthetic oligonucleotide
aggggcactggtgggctttctgg

SEQ ID NO: 4293 - DNA, 23 bp, Artificial Sequence
  Description of Artificial Sequence: Synthetic oligonucleotide
cgtgactgaggggcactggtggg

SEQ ID NO: 4294 - DNA, 23 bp, Artificial Sequence
  Description of Artificial Sequence: Synthetic oligonucleotide
ccgtgactgaggggcactggtgg

SEQ ID NO: 4295 - DNA, 23 bp, Artificial Sequence
  Description of Artificial Sequence: Synthetic oligonucleotide
caaccgtgactgaggggcactgg

SEQ ID NO: 4296 - DNA, 23 bp, Artificial Sequence
  Description of Artificial Sequence: Synthetic oligonucleotide
tcataacaaccgtgactgagggg

SEQ ID NO: 4297 - DNA, 23 bp, Artificial Sequence
  Description of Artificial Sequence: Synthetic oligonucleotide
ttcataacaaccgtgactgaggg

SEQ ID NO: 4298 - DNA, 23 bp, Artificial Sequence
  Description of Artificial Sequence: Synthetic oligonucleotide
ccaccagtgcccctcagtcacgg

SEQ ID NO: 4299 - DNA, 23 bp, Artificial Sequence
  Description of Artificial Sequence: Synthetic oligonucleotide
attcataacaaccgtgactgagg

SEQ ID NO: 4300 - DNA, 23 bp, Artificial Sequence
  Description of Artificial Sequence: Synthetic oligonucleotide
tgttatgaatgacatgctaatgg

SEQ ID NO: 4301 - DNA, 23 bp, Artificial Sequence
  Description of Artificial Sequence: Synthetic oligonucleotide
acatgctaatggtttcactctgg

SEQ ID NO: 4302 - DNA, 23 bp, Artificial Sequence
  Description of Artificial Sequence: Synthetic oligonucleotide
ctgaagaggaaagaaaaggcagg

SEQ ID NO: 4303 - DNA, 23 bp, Artificial Sequence
  Description of Artificial Sequence: Synthetic oligonucleotide
aggctaggcgcaaacctagcagg

SEQ ID NO: 4304 - DNA, 23 bp, Artificial Sequence
  Description of Artificial Sequence: Synthetic oligonucleotide
gacctgaggctgctcaggctagg

SEQ ID NO: 4305 - DNA, 23 bp, Artificial Sequence
  Description of Artificial Sequence: Synthetic oligonucleotide
cagaggacctgaggctgctcagg

SEQ ID NO: 4306 - DNA, 23 bp, Artificial Sequence
  Description of Artificial Sequence: Synthetic oligonucleotide
cgcctagcctgagcagcctcagg

SEQ ID NO: 4307 - DNA, 23 bp, Artificial Sequence
  Description of Artificial Sequence: Synthetic oligonucleotide
tggcccaaacagaggacctgagg

SEQ ID NO: 4308 - DNA, 23 bp, Artificial Sequence
  Description of Artificial Sequence: Synthetic oligonucleotide
gcagcctcaggtcctctgtttgg

SEQ ID NO: 4309 - DNA, 23 bp, Artificial Sequence
  Description of Artificial Sequence: Synthetic oligonucleotide
cagcctcaggtcctctgtttggg

SEQ ID NO: 4310 - DNA, 23 bp, Artificial Sequence
  Description of Artificial Sequence: Synthetic oligonucleotide
ctcctctatggcccaaacagagg

SEQ ID NO: 4311 - DNA, 23 bp, Artificial Sequence
  Description of Artificial Sequence: Synthetic oligonucleotide
gtcctctgtttgggccatagagg

SEQ ID NO: 4312 - DNA, 23 bp, Artificial Sequence
  Description of Artificial Sequence: Synthetic oligonucleotide
gggctggagaggctcctctatgg

SEQ ID NO: 4313 - DNA, 23 bp, Artificial Sequence
  Description of Artificial Sequence: Synthetic oligonucleotide
aaggaagacaggggctggagagg

SEQ ID NO: 4314 - DNA, 23 bp, Artificial Sequence
  Description of Artificial Sequence: Synthetic oligonucleotide
cagccaaggaagacaggggctgg

SEQ ID NO: 4315 - DNA, 23 bp, Artificial Sequence
  Description of Artificial Sequence: Synthetic oligonucleotide
ggagcagccaaggaagacagggg

SEQ ID NO: 4316 - DNA, 23 bp, Artificial Sequence
  Description of Artificial Sequence: Synthetic oligonucleotide
gggagcagccaaggaagacaggg

SEQ ID NO: 4317 - DNA, 23 bp, Artificial Sequence
  Description of Artificial Sequence: Synthetic oligonucleotide
ggggagcagccaaggaagacagg

SEQ ID NO: 4318 - DNA, 23 bp, Artificial Sequence
  Description of Artificial Sequence: Synthetic oligonucleotide
tctccagcccctgtcttccttgg

SEQ ID NO: 4319 - DNA, 23 bp, Artificial Sequence
  Description of Artificial Sequence: Synthetic oligonucleotide
agagccctggggagcagccaagg

SEQ ID NO: 4320 - DNA, 23 bp, Artificial Sequence
  Description of Artificial Sequence: Synthetic oligonucleotide
gtcttccttggctgctccccagg

SEQ ID NO: 4321 - DNA, 23 bp, Artificial Sequence
  Description of Artificial Sequence: Synthetic oligonucleotide
tcttccttggctgctccccaggg

SEQ ID NO: 4322 - DNA, 23 bp, Artificial Sequence
  Description of Artificial Sequence: Synthetic oligonucleotide
gaagttttaagagagccctgggg

SEQ ID NO: 4323 - DNA, 23 bp, Artificial Sequence
  Description of Artificial Sequence: Synthetic oligonucleotide
agaagttttaagagagccctggg

SEQ ID NO: 4324 - DNA, 23 bp, Artificial Sequence
  Description of Artificial Sequence: Synthetic oligonucleotide
gagaagttttaagagagccctgg

SEQ ID NO: 4325 - DNA, 23 bp, Artificial Sequence
  Description of Artificial Sequence: Synthetic oligonucleotide
aggatgcctcagtgggagtgggg

SEQ ID NO: 4326 - DNA, 23 bp, Artificial Sequence
  Description of Artificial Sequence: Synthetic oligonucleotide
gaggatgcctcagtgggagtggg

SEQ ID NO: 4327 - DNA, 23 bp, Artificial Sequence
  Description of Artificial Sequence: Synthetic oligonucleotide
tgaggatgcctcagtgggagtgg

SEQ ID NO: 4328 - DNA, 23 bp, Artificial Sequence
  Description of Artificial Sequence: Synthetic oligonucleotide
acttctccccactcccactgagg

SEQ ID NO: 4329 - DNA, 23 bp, Artificial Sequence
  Description of Artificial Sequence: Synthetic oligonucleotide
ggggctgaggatgcctcagtggg

SEQ ID NO: 4330 - DNA, 23 bp, Artificial Sequence
  Description of Artificial Sequence: Synthetic oligonucleotide
tggggctgaggatgcctcagtgg

SEQ ID NO: 4331 - DNA, 23 bp, Artificial Sequence
  Description of Artificial Sequence: Synthetic oligonucleotide
tttgacacaggctggggctgagg

SEQ ID NO: 4332 - DNA, 23 bp, Artificial Sequence
  Description of Artificial Sequence: Synthetic oligonucleotide
tctgaatttgacacaggctgggg

SEQ ID NO: 4333 - DNA, 23 bp, Artificial Sequence
  Description of Artificial Sequence: Synthetic oligonucleotide
ctctgaatttgacacaggctggg

SEQ ID NO: 4334 - DNA, 23 bp, Artificial Sequence
  Description of Artificial Sequence: Synthetic oligonucleotide
actctgaatttgacacaggctgg

SEQ ID NO: 4335 - DNA, 23 bp, Artificial Sequence
  Description of Artificial Sequence: Synthetic oligonucleotide
ctttactctgaatttgacacagg

SEQ ID NO: 4336 - DNA, 23 bp, Artificial Sequence
  Description of Artificial Sequence: Synthetic oligonucleotide
aaattcagagtaaagaaccaagg

SEQ ID NO: 4337 - DNA, 23 bp, Artificial Sequence
  Description of Artificial Sequence: Synthetic oligonucleotide
tgaaagccagggagttgccttgg

SEQ ID NO: 4338 - DNA, 23 bp, Artificial Sequence
  Description of Artificial Sequence: Synthetic oligonucleotide
aaagaaccaaggcaactccctgg

SEQ ID NO: 4339 - DNA, 23 bp, Artificial Sequence
  Description of Artificial Sequence: Synthetic oligonucleotide
gctttggcccatgaaagccaggg

SEQ ID NO: 4340 - DNA, 23 bp, Artificial Sequence
  Description of Artificial Sequence: Synthetic oligonucleotide
cgctttggcccatgaaagccagg

SEQ ID NO: 4341 - DNA, 23 bp, Artificial Sequence
  Description of Artificial Sequence: Synthetic oligonucleotide
aggcaactccctggctttcatgg

SEQ ID NO: 4342 - DNA, 23 bp, Artificial Sequence
  Description of Artificial Sequence: Synthetic oligonucleotide
ggcaactccctggctttcatggg

SEQ ID NO: 4343 - DNA, 23 bp, Artificial Sequence
  Description of Artificial Sequence: Synthetic oligonucleotide
gctttcatgggccaaagcgcagg

SEQ ID NO: 4344 - DNA, 23 bp, Artificial Sequence
  Description of Artificial Sequence: Synthetic oligonucleotide
cggtgtgaaagcctgcgctttgg

SEQ ID NO: 4345 - DNA, 23 bp, Artificial Sequence
  Description of Artificial Sequence: Synthetic oligonucleotide
aagcgcaggctttcacaccgagg

SEQ ID NO: 4346 - DNA, 23 bp, Artificial Sequence
  Description of Artificial Sequence: Synthetic oligonucleotide
gatctgaggctcagaggcctcgg

SEQ ID NO: 4347 - DNA, 23 bp, Artificial Sequence
  Description of Artificial Sequence: Synthetic oligonucleotide
ccccatgatctgaggctcagagg

SEQ ID NO: 4348 - DNA, 23 bp, Artificial Sequence
  Description of Artificial Sequence: Synthetic oligonucleotide
agtgacttccccatgatctgagg

SEQ ID NO: 4349 - DNA, 23 bp, Artificial Sequence
  Description of Artificial Sequence: Synthetic oligonucleotide
ggcctctgagcctcagatcatgg

SEQ ID NO: 4350 - DNA, 23 bp, Artificial Sequence
  Description of Artificial Sequence: Synthetic oligonucleotide
gcctctgagcctcagatcatggg

SEQ ID NO: 4351 - DNA, 23 bp, Artificial Sequence
  Description of Artificial Sequence: Synthetic oligonucleotide
cctctgagcctcagatcatgggg

SEQ ID NO: 4352 - DNA, 23 bp, Artificial Sequence
  Description of Artificial Sequence: Synthetic oligonucleotide
gatcatggggaagtcactgctgg

SEQ ID NO: 4353 - DNA, 23 bp, Artificial Sequence
  Description of Artificial Sequence: Synthetic oligonucleotide
ggagagaacagacatagctctgg

SEQ ID NO: 4354 - DNA, 23 bp, Artificial Sequence
  Description of Artificial Sequence: Synthetic oligonucleotide
gggctgccctcttgggcagatgg

SEQ ID NO: 4355 - DNA, 23 bp, Artificial Sequence
  Description of Artificial Sequence: Synthetic oligonucleotide
ctggaagccatctgcccaagagg

SEQ ID NO: 4356 - DNA, 23 bp, Artificial Sequence
  Description of Artificial Sequence: Synthetic oligonucleotide
tggaagccatctgcccaagaggg

SEQ ID NO: 4357 - DNA, 23 bp, Artificial Sequence
  Description of Artificial Sequence: Synthetic oligonucleotide
ttgggatgggctgccctcttggg

SEQ ID NO: 4358 - DNA, 23 bp, Artificial Sequence
  Description of Artificial Sequence: Synthetic oligonucleotide
cttgggatgggctgccctcttgg

SEQ ID NO: 4359 - DNA, 23 bp, Artificial Sequence
  Description of Artificial Sequence: Synthetic oligonucleotide
ctgtaagatgaacttgggatggg

SEQ ID NO: 4360 - DNA, 23 bp, Artificial Sequence
  Description of Artificial Sequence: Synthetic oligonucleotide
actgtaagatgaacttgggatgg

SEQ ID NO: 4361 - DNA, 23 bp, Artificial Sequence
  Description of Artificial Sequence: Synthetic oligonucleotide
ggccactgtaagatgaacttggg

SEQ ID NO: 4362 - DNA, 23 bp, Artificial Sequence
  Description of Artificial Sequence: Synthetic oligonucleotide
tggccactgtaagatgaacttgg

SEQ ID NO: 4363 - DNA, 23 bp, Artificial Sequence
  Description of Artificial Sequence: Synthetic oligonucleotide
atcccaagttcatcttacagtgg

SEQ ID NO: 4364 - DNA, 23 bp, Artificial Sequence
  Description of Artificial Sequence: Synthetic oligonucleotide
aagttcatcttacagtggccagg

SEQ ID NO: 4365 - DNA, 23 bp, Artificial Sequence
  Description of Artificial Sequence: Synthetic oligonucleotide
gccccggctcagggcaggcctgg

SEQ ID NO: 4366 - DNA, 23 bp, Artificial Sequence
  Description of Artificial Sequence: Synthetic oligonucleotide
cagaggccccggctcagggcagg

SEQ ID NO: 4367 - DNA, 23 bp, Artificial Sequence
  Description of Artificial Sequence: Synthetic oligonucleotide
tggccaggcctgccctgagccgg

SEQ ID NO: 4368 - DNA, 23 bp, Artificial Sequence
  Description of Artificial Sequence: Synthetic oligonucleotide
ggccaggcctgccctgagccggg

SEQ ID NO: 4369 - DNA, 23 bp, Artificial Sequence
  Description of Artificial Sequence: Synthetic oligonucleotide
gacccagaggccccggctcaggg

SEQ ID NO: 4370 - DNA, 23 bp, Artificial Sequence
  Description of Artificial Sequence: Synthetic oligonucleotide
gccaggcctgccctgagccgggg

SEQ ID NO: 4371 - DNA, 23 bp, Artificial Sequence
  Description of Artificial Sequence: Synthetic oligonucleotide
tgacccagaggccccggctcagg

SEQ ID NO: 4372 - DNA, 23 bp, Artificial Sequence
  Description of Artificial Sequence: Synthetic oligonucleotide
gaagagtgacccagaggccccgg

SEQ ID NO: 4373 - DNA, 23 bp, Artificial Sequence
  Description of Artificial Sequence: Synthetic oligonucleotide
ctgccctgagccggggcctctgg

SEQ ID NO: 4374 - DNA, 23 bp, Artificial Sequence
  Description of Artificial Sequence: Synthetic oligonucleotide
tgccctgagccggggcctctggg

SEQ ID NO: 4375 - DNA, 23 bp, Artificial Sequence
  Description of Artificial Sequence: Synthetic oligonucleotide
acagcagaagagtgacccagagg

SEQ ID NO: 4376 - DNA, 23 bp, Artificial Sequence
  Description of Artificial Sequence: Synthetic oligonucleotide
ggtcactcttctgctgtccatgg

SEQ ID NO: 4377 - DNA, 23 bp, Artificial Sequence
  Description of Artificial Sequence: Synthetic oligonucleotide
acccaggatgggcaatgccatgg

SEQ ID NO: 4378 - DNA, 23 bp, Artificial Sequence
  Description of Artificial Sequence: Synthetic oligonucleotide
gtccatggcattgcccatcctgg

SEQ ID NO: 4379 - DNA, 23 bp, Artificial Sequence
  Description of Artificial Sequence: Synthetic oligonucleotide
tccatggcattgcccatcctggg

SEQ ID NO: 4380 - DNA, 23 bp, Artificial Sequence
  Description of Artificial Sequence: Synthetic oligonucleotide
gccccagcctcacccaggatggg

SEQ ID NO: 4381 - DNA, 23 bp, Artificial Sequence
  Description of Artificial Sequence: Synthetic oligonucleotide
agccccagcctcacccaggatgg

SEQ ID NO: 4382 - DNA, 23 bp, Artificial Sequence
  Description of Artificial Sequence: Synthetic oligonucleotide
ggcattgcccatcctgggtgagg

SEQ ID NO: 4383 - DNA, 23 bp, Artificial Sequence
  Description of Artificial Sequence: Synthetic oligonucleotide
ggagagccccagcctcacccagg

SEQ ID NO: 4384 - DNA, 23 bp, Artificial Sequence
  Description of Artificial Sequence: Synthetic oligonucleotide
ttgcccatcctgggtgaggctgg

SEQ ID NO: 4385 - DNA, 23 bp, Artificial Sequence
  Description of Artificial Sequence: Synthetic oligonucleotide
tgcccatcctgggtgaggctggg

SEQ ID NO: 4386 - DNA, 23 bp, Artificial Sequence
  Description of Artificial Sequence: Synthetic oligonucleotide
gcccatcctgggtgaggctgggg

SEQ ID NO: 4387 - DNA, 23 bp, Artificial Sequence
  Description of Artificial Sequence: Synthetic oligonucleotide
gggtgaggctggggctctcctgg

SEQ ID NO: 4388 - DNA, 23 bp, Artificial Sequence
  Description of Artificial Sequence: Synthetic oligonucleotide
ggtgaggctggggctctcctggg

SEQ ID NO: 4389 - DNA, 23 bp, Artificial Sequence
  Description of Artificial Sequence: Synthetic oligonucleotide
ccagaatacatacagtgcccagg

SEQ ID NO: 4390 - DNA, 23 bp, Artificial Sequence
  Description of Artificial Sequence: Synthetic oligonucleotide
cctgggcactgtatgtattctgg

SEQ ID NO: 4391 - DNA, 23 bp, Artificial Sequence
  Description of Artificial Sequence: Synthetic oligonucleotide
actgtatgtattctggatacagg

SEQ ID NO: 4392 - DNA, 23 bp, Artificial Sequence
  Description of Artificial Sequence: Synthetic oligonucleotide
ctgtatgtattctggatacaggg

SEQ ID NO: 4393 - DNA, 23 bp, Artificial Sequence
  Description of Artificial Sequence: Synthetic oligonucleotide
tattctggatacagggatactgg

SEQ ID NO: 4394 - DNA, 23 bp, Artificial Sequence
  Description of Artificial Sequence: Synthetic oligonucleotide
attctggatacagggatactggg

SEQ ID NO: 4395 - DNA, 23 bp, Artificial Sequence
  Description of Artificial Sequence: Synthetic oligonucleotide
tactgggctcgctatgtgtgtgg

SEQ ID NO: 4396 - DNA, 23 bp, Artificial Sequence
  Description of Artificial Sequence: Synthetic oligonucleotide
gggctggggcaaggaagggatgg

SEQ ID NO: 4397 - DNA, 23 bp, Artificial Sequence
  Description of Artificial Sequence: Synthetic oligonucleotide
ggtggggctggggcaaggaaggg

SEQ ID NO: 4398 - DNA, 23 bp, Artificial Sequence
  Description of Artificial Sequence: Synthetic oligonucleotide
aggtggggctggggcaaggaagg

SEQ ID NO: 4399 - DNA, 23 bp, Artificial Sequence
  Description of Artificial Sequence: Synthetic oligonucleotide
agggaggtggggctggggcaagg

SEQ ID NO: 4400 - DNA, 23 bp, Artificial Sequence
  Description of Artificial Sequence: Synthetic oligonucleotide
ttgagagggaggtggggctgggg

SEQ ID NO: 4401 - DNA, 23 bp, Artificial Sequence
  Description of Artificial Sequence: Synthetic oligonucleotide
tttgagagggaggtggggctggg

SEQ ID NO: 4402 - DNA, 23 bp, Artificial Sequence
  Description of Artificial Sequence: Synthetic oligonucleotide
gtttgagagggaggtggggctgg

SEQ ID NO: 4403 - DNA, 23 bp, Artificial Sequence
  Description of Artificial Sequence: Synthetic oligonucleotide
gagggtttgagagggaggtgggg

SEQ ID NO: 4404 - DNA, 23 bp, Artificial Sequence
  Description of Artificial Sequence: Synthetic oligonucleotide
agagggtttgagagggaggtggg

SEQ ID NO: 4405 - DNA, 23 bp, Artificial Sequence
  Description of Artificial Sequence: Synthetic oligonucleotide
gagagggtttgagagggaggtgg

SEQ ID NO: 4406 - DNA, 23 bp, Artificial Sequence
  Description of Artificial Sequence: Synthetic oligonucleotide
ccagagagggtttgagagggagg

SEQ ID NO: 4407 - DNA, 23 bp, Artificial Sequence
  Description of Artificial Sequence: Synthetic oligonucleotide
gagccagagagggtttgagaggg

SEQ ID NO: 4408 - DNA, 23 bp, Artificial Sequence
  Description of Artificial Sequence: Synthetic oligonucleotide
agagccagagagggtttgagagg

SEQ ID NO: 4409 - DNA, 23 bp, Artificial Sequence
  Description of Artificial Sequence: Synthetic oligonucleotide
cctccctctcaaaccctctctgg

SEQ ID NO: 4410 - DNA, 23 bp, Artificial Sequence
  Description of Artificial Sequence: Synthetic oligonucleotide
agctcagaaagagccagagaggg

SEQ ID NO: 4411 - DNA, 23 bp, Artificial Sequence
  Description of Artificial Sequence: Synthetic oligonucleotide
aagctcagaaagagccagagagg

SEQ ID NO: 4412 - DNA, 23 bp, Artificial Sequence
  Description of Artificial Sequence: Synthetic oligonucleotide
ggcaagctggggagcaggaaagg

SEQ ID NO: 4413 - DNA, 23 bp, Artificial Sequence
  Description of Artificial Sequence: Synthetic oligonucleotide
cactgggcaagctggggagcagg

SEQ ID NO: 4414 - DNA, 23 bp, Artificial Sequence
  Description of Artificial Sequence: Synthetic oligonucleotide
actgagcactgggcaagctgggg

SEQ ID NO: 4415 - DNA, 23 bp, Artificial Sequence
  Description of Artificial Sequence: Synthetic oligonucleotide
cactgagcactgggcaagctggg

SEQ ID NO: 4416 - DNA, 23 bp, Artificial Sequence
  Description of Artificial Sequence: Synthetic oligonucleotide
gcactgagcactgggcaagctgg

SEQ ID NO: 4417 - DNA, 23 bp, Artificial Sequence
  Description of Artificial Sequence: Synthetic oligonucleotide
caagtggggcactgagcactggg

SEQ ID NO: 4418 - DNA, 23 bp, Artificial Sequence
  Description of Artificial Sequence: Synthetic oligonucleotide
ccaagtggggcactgagcactgg

SEQ ID NO: 4419 - DNA, 23 bp, Artificial Sequence
  Description of Artificial Sequence: Synthetic oligonucleotide
ccagtgctcagtgccccacttgg

SEQ ID NO: 4420 - DNA, 23 bp, Artificial Sequence
  Description of Artificial Sequence: Synthetic oligonucleotide
agtagcaaaagagccaagtgggg

SEQ ID NO: 4421 - DNA, 23 bp, Artificial Sequence
  Description of Artificial Sequence: Synthetic oligonucleotide
aagtagcaaaagagccaagtggg

SEQ ID NO: 4422 - DNA, 23 bp, Artificial Sequence
  Description of Artificial Sequence: Synthetic oligonucleotide
gaagtagcaaaagagccaagtgg

SEQ ID NO: 4423 - DNA, 23 bp, Artificial Sequence
  Description of Artificial Sequence: Synthetic oligonucleotide
acttggctcttttgctacttcgg

SEQ ID NO: 4424 - DNA, 23 bp, Artificial Sequence
  Description of Artificial Sequence: Synthetic oligonucleotide
cttggctcttttgctacttcggg

SEQ ID NO: 4425 - DNA, 23 bp, Artificial Sequence
  Description of Artificial Sequence: Synthetic oligonucleotide
ctcttttgctacttcgggtcagg

SEQ ID NO: 4426 - DNA, 23 bp, Artificial Sequence
  Description of Artificial Sequence: Synthetic oligonucleotide
ttttgctacttcgggtcaggtgg

SEQ ID NO: 4427 - DNA, 23 bp, Artificial Sequence
  Description of Artificial Sequence: Synthetic oligonucleotide
tcgggtcaggtggagcctcttgg

SEQ ID NO: 4428 - DNA, 23 bp, Artificial Sequence
  Description of Artificial Sequence: Synthetic oligonucleotide
cgggtcaggtggagcctcttggg

SEQ ID NO: 4429 - DNA, 23 bp, Artificial Sequence
  Description of Artificial Sequence: Synthetic oligonucleotide
aggcacttcacattcccaagagg

SEQ ID NO: 4430 - DNA, 23 bp, Artificial Sequence
  Description of Artificial Sequence: Synthetic oligonucleotide
tgaagtgcaatctttctgtaagg

SEQ ID NO: 4431 - DNA, 23 bp, Artificial Sequence
  Description of Artificial Sequence: Synthetic oligonucleotide
cagaaagattgcacttcaagagg

SEQ ID NO: 4432 - DNA, 23 bp, Artificial Sequence
  Description of Artificial Sequence: Synthetic oligonucleotide
agattgcacttcaagaggagagg

SEQ ID NO: 4433 - DNA, 23 bp, Artificial Sequence
  Description of Artificial Sequence: Synthetic oligonucleotide
acttcaagaggagaggctgcagg

SEQ ID NO: 4434 - DNA, 23 bp, Artificial Sequence
  Description of Artificial Sequence: Synthetic oligonucleotide
cttcaagaggagaggctgcaggg

SEQ ID NO: 4435 - DNA, 23 bp, Artificial Sequence
  Description of Artificial Sequence: Synthetic oligonucleotide
ccaggcctctgggtttaggatgg

SEQ ID NO: 4436 - DNA, 23 bp, Artificial Sequence
  Description of Artificial Sequence: Synthetic oligonucleotide
agctccaggcctctgggtttagg

SEQ ID NO: 4437 - DNA, 23 bp, Artificial Sequence
  Description of Artificial Sequence: Synthetic oligonucleotide
gggagccatcctaaacccagagg

SEQ ID NO: 4438 - DNA, 23 bp, Artificial Sequence
  Description of Artificial Sequence: Synthetic oligonucleotide
acagtaagctccaggcctctggg

SEQ ID NO: 4439 - DNA, 23 bp, Artificial Sequence
  Description of Artificial Sequence: Synthetic oligonucleotide
ccatcctaaacccagaggcctgg

SEQ ID NO: 4440 - DNA, 23 bp, Artificial Sequence
  Description of Artificial Sequence: Synthetic oligonucleotide
cacagtaagctccaggcctctgg

SEQ ID NO: 4441 - DNA, 23 bp, Artificial Sequence
  Description of Artificial Sequence: Synthetic oligonucleotide
aaagtgacacagtaagctccagg

SEQ ID NO: 4442 - DNA, 23 bp, Artificial Sequence
  Description of Artificial Sequence: Synthetic oligonucleotide
gtcactttacttttgtacacagg

SEQ ID NO: 4443 - DNA, 23 bp, Artificial Sequence
  Description of Artificial Sequence: Synthetic oligonucleotide
tcactttacttttgtacacaggg

SEQ ID NO: 4444 - DNA, 23 bp, Artificial Sequence
  Description of Artificial Sequence: Synthetic oligonucleotide
cactttacttttgtacacagggg

SEQ ID NO: 4445 - DNA, 23 bp, Artificial Sequence
  Description of Artificial Sequence: Synthetic oligonucleotide
aatccttctcgagggcactaagg

SEQ ID NO: 4446 - DNA, 23 bp, Artificial Sequence
  Description of Artificial Sequence: Synthetic oligonucleotide
tctccttagtgccctcgagaagg

SEQ ID NO: 4447 - DNA, 23 bp, Artificial Sequence
  Description of Artificial Sequence: Synthetic oligonucleotide
gggccaagaatccttctcgaggg

SEQ ID NO: 4448 - DNA, 23 bp, Artificial Sequence
  Description of Artificial Sequence: Synthetic oligonucleotide
agggccaagaatccttctcgagg

SEQ ID NO: 4449 - DNA, 23 bp, Artificial Sequence
  Description of Artificial Sequence: Synthetic oligonucleotide
gtgccctcgagaaggattcttgg

SEQ ID NO: 4450 - DNA, 23 bp, Artificial Sequence
  Description of Artificial Sequence: Synthetic oligonucleotide
gcctcaggagtagaagctcaggg

SEQ ID NO: 4451 - DNA, 23 bp, Artificial Sequence
  Description of Artificial Sequence: Synthetic oligonucleotide
ggcctcaggagtagaagctcagg

SEQ ID NO: 4452 - DNA, 23 bp, Artificial Sequence
  Description of Artificial Sequence: Synthetic oligonucleotide
gccctgagcttctactcctgagg

SEQ ID NO: 4453 - DNA, 23 bp, Artificial Sequence
  Description of Artificial Sequence: Synthetic oligonucleotide
ggctgcacagaggtggcctcagg

SEQ ID NO: 4454 - DNA, 23 bp, Artificial Sequence
  Description of Artificial Sequence: Synthetic oligonucleotide
gagctggggctgcacagaggtgg

SEQ ID NO: 4455 - DNA, 23 bp, Artificial Sequence
  Description of Artificial Sequence: Synthetic oligonucleotide
agggagctggggctgcacagagg

SEQ ID NO: 4456 - DNA, 23 bp, Artificial Sequence
  Description of Artificial Sequence: Synthetic oligonucleotide
gcctagagttgagggagctgggg

SEQ ID NO: 4457 - DNA, 23 bp, Artificial Sequence
  Description of Artificial Sequence: Synthetic oligonucleotide
agcctagagttgagggagctggg

SEQ ID NO: 4458 - DNA, 23 bp, Artificial Sequence
  Description of Artificial Sequence: Synthetic oligonucleotide
cagcctagagttgagggagctgg

SEQ ID NO: 4459 - DNA, 23 bp, Artificial Sequence
  Description of Artificial Sequence: Synthetic oligonucleotide
agactacagcctagagttgaggg

SEQ ID NO: 4460 - DNA, 23 bp, Artificial Sequence
  Description of Artificial Sequence: Synthetic oligonucleotide
gagactacagcctagagttgagg

SEQ ID NO: 4461 - DNA, 23 bp, Artificial Sequence
  Description of Artificial Sequence: Synthetic oligonucleotide
gccccagctccctcaactctagg

SEQ ID NO: 4462 - DNA, 23 bp, Artificial Sequence
  Description of Artificial Sequence: Synthetic oligonucleotide
actctaggctgtagtctcagtgg

SEQ ID NO: 4463 - DNA, 23 bp, Artificial Sequence
  Description of Artificial Sequence: Synthetic oligonucleotide
ctctaggctgtagtctcagtggg

SEQ ID NO: 4464 - DNA, 23 bp, Artificial Sequence
  Description of Artificial Sequence: Synthetic oligonucleotide
gtagtctcagtgggaaagcctgg

SEQ ID NO: 4465 - DNA, 23 bp, Artificial Sequence
  Description of Artificial Sequence: Synthetic oligonucleotide
ctcagtgggaaagcctggcttgg

SEQ ID NO: 4466 - DNA, 23 bp, Artificial Sequence
  Description of Artificial Sequence: Synthetic oligonucleotide
tcagtgggaaagcctggcttggg

SEQ ID NO: 4467 - DNA, 23 bp, Artificial Sequence
  Description of Artificial Sequence: Synthetic oligonucleotide
cagtgggaaagcctggcttgggg

SEQ ID NO: 4468 - DNA, 23 bp, Artificial Sequence
  Description of Artificial Sequence: Synthetic oligonucleotide
tcctaggagacccccaagccagg

SEQ ID NO: 4469 - DNA, 23 bp, Artificial Sequence
  Description of Artificial Sequence: Synthetic oligonucleotide
agtgggaaagcctggcttggggg

SEQ ID NO: 4470 - DNA, 23 bp, Artificial Sequence
  Description of Artificial Sequence: Synthetic oligonucleotide
gcctggcttgggggtctcctagg

SEQ ID NO: 4471 - DNA, 23 bp, Artificial Sequence
  Description of Artificial Sequence: Synthetic oligonucleotide
gccttcaggtggacattcctagg

SEQ ID NO: 4472 - DNA, 23 bp, Artificial Sequence
  Description of Artificial Sequence: Synthetic oligonucleotide
tcctaggaatgtccacctgaagg

SEQ ID NO: 4473 - DNA, 23 bp, Artificial Sequence
  Description of Artificial Sequence: Synthetic oligonucleotide
ctatcaagtgtgccttcaggtgg

SEQ ID NO: 4474 - DNA, 23 bp, Artificial Sequence
  Description of Artificial Sequence: Synthetic oligonucleotide
cccctatcaagtgtgccttcagg

SEQ ID NO: 4475 - DNA, 23 bp, Artificial Sequence
  Description of Artificial Sequence: Synthetic oligonucleotide
cacctgaaggcacacttgatagg

SEQ ID NO: 4476 - DNA, 23 bp, Artificial Sequence
  Description of Artificial Sequence: Synthetic oligonucleotide
acctgaaggcacacttgataggg

SEQ ID NO: 4477 - DNA, 23 bp, Artificial Sequence
  Description of Artificial Sequence: Synthetic oligonucleotide
cctgaaggcacacttgatagggg

SEQ ID NO: 4478 - DNA, 23 bp, Artificial Sequence
  Description of Artificial Sequence: Synthetic oligonucleotide
tgcacaacttatgtctgccaagg

SEQ ID NO: 4479 - DNA, 23 bp, Artificial Sequence
  Description of Artificial Sequence: Synthetic oligonucleotide
gggagttcctcaggtggccttgg

SEQ ID NO: 4480 - DNA, 23 bp, Artificial Sequence
  Description of Artificial Sequence: Synthetic oligonucleotide
atgtctgccaaggccacctgagg

SEQ ID NO: 4481 - DNA, 23 bp, Artificial Sequence
  Description of Artificial Sequence: Synthetic oligonucleotide
gcaccagggagttcctcaggtgg

SEQ ID NO: 4482 - DNA, 23 bp, Artificial Sequence
  Description of Artificial Sequence: Synthetic oligonucleotide
taggcaccagggagttcctcagg

SEQ ID NO: 4483 - DNA, 23 bp, Artificial Sequence
  Description of Artificial Sequence: Synthetic oligonucleotide
aggccacctgaggaactccctgg

SEQ ID NO: 4484 - DNA, 23 bp, Artificial Sequence
  Description of Artificial Sequence: Synthetic oligonucleotide
ggtggaacttataggcaccaggg

SEQ ID NO: 4485 - DNA, 23 bp, Artificial Sequence
  Description of Artificial Sequence: Synthetic oligonucleotide
aggtggaacttataggcaccagg

SEQ ID NO: 4486 - DNA, 23 bp, Artificial Sequence
  Description of Artificial Sequence: Synthetic oligonucleotide
aaggggaaggtggaacttatagg

SEQ ID NO: 4487 - DNA, 23 bp, Artificial Sequence
  Description of Artificial Sequence: Synthetic oligonucleotide
gaggaagaggaaggggaaggtgg

SEQ ID NO: 4488 - DNA, 23 bp, Artificial Sequence
  Description of Artificial Sequence: Synthetic oligonucleotide
ggcgaggaagaggaaggggaagg

SEQ ID NO: 4489 - DNA, 23 bp, Artificial Sequence
  Description of Artificial Sequence: Synthetic oligonucleotide
ctggggcgaggaagaggaagggg

SEQ ID NO: 4490 - DNA, 23 bp, Artificial Sequence
  Description of Artificial Sequence: Synthetic oligonucleotide
gctggggcgaggaagaggaaggg

SEQ ID NO: 4491 - DNA, 23 bp, Artificial Sequence
  Description of Artificial Sequence: Synthetic oligonucleotide
tgctggggcgaggaagaggaagg

SEQ ID NO: 4492 - DNA, 23 bp, Artificial Sequence
  Description of Artificial Sequence: Synthetic oligonucleotide
aaaatgctggggcgaggaagagg

SEQ ID NO: 4493 - DNA, 23 bp, Artificial Sequence
  Description of Artificial Sequence: Synthetic oligonucleotide
tcagaaaaaatgctggggcgagg

SEQ ID NO: 4494 - DNA, 23 bp, Artificial Sequence
  Description of Artificial Sequence: Synthetic oligonucleotide
cctactcagaaaaaatgctgggg

SEQ ID NO: 4495 - DNA, 23 bp, Artificial Sequence
  Description of Artificial Sequence: Synthetic oligonucleotide
ccctactcagaaaaaatgctggg

SEQ ID NO: 4496 - DNA, 23 bp, Artificial Sequence
  Description of Artificial Sequence: Synthetic oligonucleotide
cccctactcagaaaaaatgctgg

SEQ ID NO: 4497 - DNA, 23 bp, Artificial Sequence
  Description of Artificial Sequence: Synthetic oligonucleotide
ccccagcattttttctgagtagg

SEQ ID NO: 4498 - DNA, 23 bp, Artificial Sequence
  Description of Artificial Sequence: Synthetic oligonucleotide
cccagcattttttctgagtaggg

SEQ ID NO: 4499 - DNA, 23 bp, Artificial Sequence
  Description of Artificial Sequence: Synthetic oligonucleotide
ccagcattttttctgagtagggg

SEQ ID NO: 4500 - DNA, 23 bp, Artificial Sequence
  Description of Artificial Sequence: Synthetic oligonucleotide
gcattttttctgagtaggggtgg

SEQ ID NO: 4501 - DNA, 23 bp, Artificial Sequence
  Description of Artificial Sequence: Synthetic oligonucleotide
tttctgagtaggggtggcaatgg

SEQ ID NO: 4502 - DNA, 23 bp, Artificial Sequence
  Description of Artificial Sequence: Synthetic oligonucleotide
ttctgagtaggggtggcaatggg

SEQ ID NO: 4503 - DNA, 23 bp, Artificial Sequence
  Description of Artificial Sequence: Synthetic oligonucleotide
cctgcaactgcttatgacaatgg

SEQ ID NO: 4504 - DNA, 23 bp, Artificial Sequence
  Description of Artificial Sequence: Synthetic oligonucleotide
ccattgtcataagcagttgcagg

SEQ ID NO: 4505 - DNA, 23 bp, Artificial Sequence
  Description of Artificial Sequence: Synthetic oligonucleotide
gaaagaaaacacaaggtgtcagg

SEQ ID NO: 4506 - DNA, 23 bp, Artificial Sequence
  Description of Artificial Sequence: Synthetic oligonucleotide
aagtcattgcagacctgtttagg

SEQ ID NO: 4507 - DNA, 23 bp, Artificial Sequence
  Description of Artificial Sequence: Synthetic oligonucleotide
cttgggggtaaggcctaaacagg

SEQ ID NO: 4508 - DNA, 23 bp, Artificial Sequence
  Description of Artificial Sequence: Synthetic oligonucleotide
cttgggcttgcttgggggtaagg

SEQ ID NO: 4509 - DNA, 23 bp, Artificial Sequence
  Description of Artificial Sequence: Synthetic oligonucleotide
gcaggcttgggcttgcttggggg

SEQ ID NO: 4510 - DNA, 23 bp, Artificial Sequence
  Description of Artificial Sequence: Synthetic oligonucleotide
ggcaggcttgggcttgcttgggg

SEQ ID NO: 4511 - DNA, 23 bp, Artificial Sequence
  Description of Artificial Sequence: Synthetic oligonucleotide
tggcaggcttgggcttgcttggg

SEQ ID NO: 4512 - DNA, 23 bp, Artificial Sequence
  Description of Artificial Sequence: Synthetic oligonucleotide
atggcaggcttgggcttgcttgg

SEQ ID NO: 4513 - DNA, 23 bp, Artificial Sequence
  Description of Artificial Sequence: Synthetic oligonucleotide
atacagcagatggcaggcttggg

SEQ ID NO: 4514 - DNA, 23 bp, Artificial Sequence
  Description of Artificial Sequence: Synthetic oligonucleotide
tatacagcagatggcaggcttgg

SEQ ID NO: 4515 - DNA, 23 bp, Artificial Sequence
  Description of Artificial Sequence: Synthetic oligonucleotide
atctatatacagcagatggcagg

SEQ ID NO: 4516 - DNA, 23 bp, Artificial Sequence
  Description of Artificial Sequence: Synthetic oligonucleotide
tcttatctatatacagcagatgg

SEQ ID NO: 4517 - DNA, 23 bp, Artificial Sequence
  Description of Artificial Sequence: Synthetic oligonucleotide
gtatatagataagaacatcatgg

SEQ ID NO: 4518 - DNA, 23 bp, Artificial Sequence
  Description of Artificial Sequence: Synthetic oligonucleotide
atggtgcagtaaaagaagcctgg

SEQ ID NO: 4519 - DNA, 23 bp, Artificial Sequence
  Description of Artificial Sequence: Synthetic oligonucleotide
agtaaaagaagcctggcctttgg

SEQ ID NO: 4520 - DNA, 23 bp, Artificial Sequence
  Description of Artificial Sequence: Synthetic oligonucleotide
ctgttctgactccaaaggccagg

SEQ ID NO: 4521 - DNA, 23 bp, Artificial Sequence
  Description of Artificial Sequence: Synthetic oligonucleotide
ccctgctgttctgactccaaagg

SEQ ID NO: 4522 - DNA, 23 bp, Artificial Sequence
  Description of Artificial Sequence: Synthetic oligonucleotide
gcctttggagtcagaacagcagg

SEQ ID NO: 4523 - DNA, 23 bp, Artificial Sequence
  Description of Artificial Sequence: Synthetic oligonucleotide
cctttggagtcagaacagcaggg

SEQ ID NO: 4524 - DNA, 23 bp, Artificial Sequence
  Description of Artificial Sequence: Synthetic oligonucleotide
gtcagaacagcagggtgacttgg

SEQ ID NO: 4525 - DNA, 23 bp, Artificial Sequence
  Description of Artificial Sequence: Synthetic oligonucleotide
tcagaacagcagggtgacttggg

SEQ ID NO: 4526 - DNA, 23 bp, Artificial Sequence
  Description of Artificial Sequence: Synthetic oligonucleotide
cagaacagcagggtgacttgggg

SEQ ID NO: 4527 - DNA, 23 bp, Artificial Sequence
  Description of Artificial Sequence: Synthetic oligonucleotide
agaaggaaatggggtgctctggg

SEQ ID NO: 4528 - DNA, 23 bp, Artificial Sequence
  Description of Artificial Sequence: Synthetic oligonucleotide
gagaaggaaatggggtgctctgg

SEQ ID NO: 4529 - DNA, 23 bp, Artificial Sequence
  Description of Artificial Sequence: Synthetic oligonucleotide
atcttacagagaaggaaatgggg

SEQ ID NO: 4530 - DNA, 23 bp, Artificial Sequence
  Description of Artificial Sequence: Synthetic oligonucleotide
catcttacagagaaggaaatggg

SEQ ID NO: 4531 - DNA, 23 bp, Artificial Sequence
  Description of Artificial Sequence: Synthetic oligonucleotide
tcatcttacagagaaggaaatgg

SEQ ID NO: 4532 - DNA, 23 bp, Artificial Sequence
  Description of Artificial Sequence: Synthetic oligonucleotide
ttatcctcatcttacagagaagg

SEQ ID NO: 4533 - DNA, 23 bp, Artificial Sequence
  Description of Artificial Sequence: Synthetic oligonucleotide
atttccttctctgtaagatgagg

SEQ ID NO: 4534 - DNA, 23 bp, Artificial Sequence
  Description of Artificial Sequence: Synthetic oligonucleotide
aataagagtaacaaccttttagg

SEQ ID NO: 4535 - DNA, 23 bp, Artificial Sequence
  Description of Artificial Sequence: Synthetic oligonucleotide
ataagagtaacaaccttttaggg

SEQ ID NO: 4536 - DNA, 23 bp, Artificial Sequence
  Description of Artificial Sequence: Synthetic oligonucleotide
aaactcaccttaaccctaaaagg

SEQ ID NO: 4537 - DNA, 23 bp, Artificial Sequence
  Description of Artificial Sequence: Synthetic oligonucleotide
gtaacaaccttttagggttaagg

SEQ ID NO: 4538 - DNA, 23 bp, Artificial Sequence
  Description of Artificial Sequence: Synthetic oligonucleotide
ttaaggtgagttttcagcttagg

SEQ ID NO: 4539 - DNA, 23 bp, Artificial Sequence
  Description of Artificial Sequence: Synthetic oligonucleotide
agttttcagcttaggaagtctgg

SEQ ID NO: 4540 - DNA, 23 bp, Artificial Sequence
  Description of Artificial Sequence: Synthetic oligonucleotide
gttttcagcttaggaagtctggg

SEQ ID NO: 4541 - DNA, 23 bp, Artificial Sequence
  Description of Artificial Sequence: Synthetic oligonucleotide
gaagtctgggaatattgcaaagg

SEQ ID NO: 4542 - DNA, 23 bp, Artificial Sequence
  Description of Artificial Sequence: Synthetic oligonucleotide
aagtctgggaatattgcaaaggg

SEQ ID NO: 4543 - DNA, 23 bp, Artificial Sequence
  Description of Artificial Sequence: Synthetic oligonucleotide
tgggaatattgcaaagggcttgg

SEQ ID NO: 4544 - DNA, 23 bp, Artificial Sequence
  Description of Artificial Sequence: Synthetic oligonucleotide
aatattgcaaagggcttggcagg

SEQ ID NO: 4545 - DNA, 23 bp, Artificial Sequence
  Description of Artificial Sequence: Synthetic oligonucleotide
aagggcttggcaggaacccatgg

SEQ ID NO: 4546 - DNA, 23 bp, Artificial Sequence
  Description of Artificial Sequence: Synthetic oligonucleotide
cttggcaggaacccatggtgagg

SEQ ID NO: 4547 - DNA, 23 bp, Artificial Sequence
  Description of Artificial Sequence: Synthetic oligonucleotide
tggaactagatcctcaccatggg

SEQ ID NO: 4548 - DNA, 23 bp, Artificial Sequence
  Description of Artificial Sequence: Synthetic oligonucleotide
ttggaactagatcctcaccatgg

SEQ ID NO: 4549 - DNA, 23 bp, Artificial Sequence
  Description of Artificial Sequence: Synthetic oligonucleotide
gttttctgtacctatcaacttgg

SEQ ID NO: 4550 - DNA, 23 bp, Artificial Sequence
  Description of Artificial Sequence: Synthetic oligonucleotide
ggatctagttccaagttgatagg

SEQ ID NO: 4551 - DNA, 23 bp, Artificial Sequence
  Description of Artificial Sequence: Synthetic oligonucleotide
ggtacagaaaaccagaacatcgg

SEQ ID NO: 4552 - DNA, 23 bp, Artificial Sequence
  Description of Artificial Sequence: Synthetic oligonucleotide
ttactcaaggcccgatgttctgg

SEQ ID NO: 4553 - DNA, 23 bp, Artificial Sequence
  Description of Artificial Sequence: Synthetic oligonucleotide
gtacagaaaaccagaacatcggg

SEQ ID NO: 4554 - DNA, 23 bp, Artificial Sequence
  Description of Artificial Sequence: Synthetic oligonucleotide
gaaacttcactctttactcaagg

SEQ ID NO: 4555 - DNA, 23 bp, Artificial Sequence
  Description of Artificial Sequence: Synthetic oligonucleotide
tgcacatagcaggtgctttgtgg

SEQ ID NO: 4556 - DNA, 23 bp, Artificial Sequence
  Description of Artificial Sequence: Synthetic oligonucleotide
catgctctcctgcacatagcagg

SEQ ID NO: 4557 - DNA, 23 bp, Artificial Sequence
  Description of Artificial Sequence: Synthetic oligonucleotide
acaaagcacctgctatgtgcagg

SEQ ID NO: 4558 - DNA, 23 bp, Artificial Sequence
  Description of Artificial Sequence: Synthetic oligonucleotide
ctgctatgtgcaggagagcatgg

SEQ ID NO: 4559 - DNA, 23 bp, Artificial Sequence
  Description of Artificial Sequence: Synthetic oligonucleotide
gtgcaggagagcatggcagaagg

SEQ ID NO: 4560 - DNA, 23 bp, Artificial Sequence
  Description of Artificial Sequence: Synthetic oligonucleotide
caggagagcatggcagaaggagg

SEQ ID NO: 4561 - DNA, 23 bp, Artificial Sequence
  Description of Artificial Sequence: Synthetic oligonucleotide
catggcagaaggaggctgcttgg

SEQ ID NO: 4562 - DNA, 23 bp, Artificial Sequence
  Description of Artificial Sequence: Synthetic oligonucleotide
agaaggaggctgcttggccctgg

SEQ ID NO: 4563 - DNA, 23 bp, Artificial Sequence
  Description of Artificial Sequence: Synthetic oligonucleotide
tgtcagaatctcaaggaccaggg

SEQ ID NO: 4564 - DNA, 23 bp, Artificial Sequence
  Description of Artificial Sequence: Synthetic oligonucleotide
ctgtcagaatctcaaggaccagg

SEQ ID NO: 4565 - DNA, 23 bp, Artificial Sequence
  Description of Artificial Sequence: Synthetic oligonucleotide
aggacactgtcagaatctcaagg

SEQ ID NO: 4566 - DNA, 23 bp, Artificial Sequence
  Description of Artificial Sequence: Synthetic oligonucleotide
agatctccccatgtctgtctagg

SEQ ID NO: 4567 - DNA, 23 bp, Artificial Sequence
  Description of Artificial Sequence: Synthetic oligonucleotide
gacagtgtcctagacagacatgg

SEQ ID NO: 4568 - DNA, 23 bp, Artificial Sequence
  Description of Artificial Sequence: Synthetic oligonucleotide
acagtgtcctagacagacatggg

SEQ ID NO: 4569 - DNA, 23 bp, Artificial Sequence
  Description of Artificial Sequence: Synthetic oligonucleotide
cagtgtcctagacagacatgggg

SEQ ID NO: 4570 - DNA, 23 bp, Artificial Sequence
  Description of Artificial Sequence: Synthetic oligonucleotide
agaagttggtaacgtcaaatagg

SEQ ID NO: 4571 - DNA, 60 bp, Homo sapiens
cacaggtcaggatctataccatgtggctgggcctgtttcctccaagagtttccagatcgt

SEQ ID NO: 4572 - DNA, 62 bp, Homo sapiens
ccccagggctagcagtgccaagtaacctgacgggtgattaatagatgcttgggtaagtatca

SEQ ID NO: 4573 - DNA, 61 bp, Homo sapiens
gtttggggggacttgacctaatcccacatcccagccccagtaatacagccctggaatttat

SEQ ID NO: 4574 - DNA, 61 bp, Homo sapiens
gctctgaacaaatcaggaggcccctcgtgggagtataaccagtcctttctttctctgtccc

SEQ ID NO: 4575 - DNA, 92 bp, Homo sapiens
tagcttaaaagaggcacttcccctgtcttccatttccagctgttccacctacttagcttaaaagaggcacttcccctgtcttcagtctcagt

SEQ ID NO: 4576 - DNA, 62 bp, Homo sapiens
ggtggcacatgcctgtaatcacagcttactcgggaggctgaggcaggagaatcacttgaacc

SEQ ID NO: 4577 - DNA, 63 bp, Homo sapiens
gccctaacagtccctgcagtgctggagctccccatccaacttggggaggcgatggaggtcact

SEQ ID NO: 4578 - DNA, 63 bp, Homo sapiens
gactccctaactgagaaaggtcacccccctgggtcagcaggccccaactcagagagaacatct

SEQ ID NO: 4579 - DNA, 62 bp, Homo sapiens
ggcttcctcccgtgacatgtggggatttatggtaactacaattcaagatgagatttgggtgg

SEQ ID NO: 4580 - DNA, 20 bp, Artificial Sequence
  Description of Artificial Sequence: Synthetic oligonucleotide
ggatctataccatgtgggct

SEQ ID NO: 4581 - DNA, 20 bp, Artificial Sequence
  Description of Artificial Sequence: Synthetic oligonucleotide
tagcagtgccaagtaactga

SEQ ID NO: 4582 - DNA, 20 bp, Artificial Sequence
  Description of Artificial Sequence: Synthetic oligonucleotide
agggctgtattactggggct

SEQ ID NO: 4583 - DNA, 20 bp, Artificial Sequence
  Description of Artificial Sequence: Synthetic oligonucleotide
caaatcaggaggcccctcgt

SEQ ID NO: 4584 - DNA, 20 bp, Artificial Sequence
  Description of Artificial Sequence: Synthetic oligonucleotide
gagactgagactgaagacag

SEQ ID NO: 4585 - DNA, 20 bp, Artificial Sequence
  Description of Artificial Sequence: Synthetic oligonucleotide
tgcctgtaatcacagctact

SEQ ID NO: 4586 - DNA, 20 bp, Artificial Sequence
  Description of Artificial Sequence: Synthetic oligonucleotide
catcgcctccccaagtgatg

SEQ ID NO: 4587 - DNA, 20 bp, Artificial Sequence
  Description of Artificial Sequence: Synthetic oligonucleotide
aactgagaaaggtcacccct

SEQ ID NO: 4588 - DNA, 20 bp, Artificial Sequence
  Description of Artificial Sequence: Synthetic oligonucleotide
cccgtgacatgtggggatta

SEQ ID NO: 4589 - DNA, 61 bp, Homo sapiens
caccactgtactccagcctggacgatagagcaagactccatctcagcaataaataaataaa

SEQ ID NO: 4590 - DNA, 64 bp, Homo sapiens
aagactccatctcagcaataaataaataaataagtaaataaataaataaataaagtgttatgat

SEQ ID NO: 4591 - DNA, 61 bp, Homo sapiens
actccatctcagcaataaataaataaataagtaaataaataaataaataaagtgttatgat

SEQ ID NO: 4592 - DNA, 61 bp, Homo sapiens
tgaatatgaatgaaggtgcttctcagagccatgcattagaactctatcacaatatatctac

SEQ ID NO: 4593 - DNA, 61 bp, Homo sapiens
tgtcagttgttgaaatagttgtgtaacaatttcccactatgattgcacatttctgtttctg

SEQ ID NO: 4594 - DNA, 60 bp, Homo sapiens
attagagagaaaatagattggtagcaatactttttttttttttcaatttactctcctttt

SEQ ID NO: 4595 - DNA, 61 bp, Homo sapiens
aattctgtgaagaaagtcattgatagcttgatggggatggcattgaatctgtaaattacct

SEQ ID NO: 4596 - DNA, 61 bp, Homo sapiens
ggccctggttatttttaatcttgtggggacgttgtatttacaaaatgtctgtagaaataga

SEQ ID NO: 4597 - DNA, 61 bp, Homo sapiens
acaatgcataataatcacctcagggcaaataaggcatctatcccctcaagtacctgtccct

SEQ ID NO: 4598 - DNA, 61 bp, Homo sapiens
tggttgactgcaaggcaaaaataatactcatgcactttgtgccttgaactttatggcaata

SEQ ID NO: 4599 - DNA, 61 bp, Homo sapiens
tgccccttggtaatatctagttcatcaaatatttcatttttattgttgtttttcttgcaag

SEQ ID NO: 4600 - DNA, 61 bp, Homo sapiens
tccattttgatgtacataaaatatatctaaacaaattcagctttgacataggggttatcgg

SEQ ID NO: 4601 - DNA, 61 bp, Homo sapiens
agcatgtgggaagtctgctctgtgtcatttttccattaaaacgcagtcctaacaggagaat

SEQ ID NO: 4602 - DNA, 61 bp, Homo sapiens
aataggttctgcgagggatcttgtcctatatacaagtaaaagtagaaagattggtatttaa

SEQ ID NO: 4603 - DNA, 60 bp, Homo sapiens
tatattagcacaaataaagtaaaacaagtgttttttttttagaaagtagttctataagga

SEQ ID NO: 4604 - DNA, 61 bp, Homo sapiens
acgattttgagattcacccatgttatagcatgttatggataatttgttcttttttttagct

SEQ ID NO: 4605 - DNA, 61 bp, Homo sapiens
gatagacatttgggctgtttccagtttggtgtattacaagtacaaatgccttttctgattc

SEQ ID NO: 4606 - DNA, 61 bp, Homo sapiens
tcactggagtgacagccagtcttatttacgggtcccacttacactcaaagggaggagatga

SEQ ID NO: 4607 - DNA, 61 bp, Homo sapiens
ggaatcttaggacccatcttagaattctgcgcattgcacatggtttttcctttgacttcct

SEQ ID NO: 4608 - DNA, 61 bp, Homo sapiens
gaggcctgctcctggaatggatgtttggtgagtcattagggctgttcacatacattctgtt

SEQ ID NO: 4609 - DNA, 60 bp, Homo sapiens
tatcattctgagctgaagttttaagagcccgtgtgtgtgtgtgtgtgtgtgtgtgtgtgt

SEQ ID NO: 4610 - DNA, 61 bp, Homo sapiens
atggacttgtggcacagatgacagaaataaatctttgttgtttaaagcccctaagatttag

SEQ ID NO: 4611 - DNA, 61 bp, Homo sapiens
gctggtacaaaaaggacagtatcacagttattctggctgccaccttctctttttctccgga

SEQ ID NO: 4612 - DNA, 61 bp, Homo sapiens
gggggaccgatagagggtacacaggcatagatcaccctcaagcagagactacaactggtta

SEQ ID NO: 4613 - DNA, 61 bp, Homo sapiens
gtttacagccctggctgcaggcatcctgccgggttggactgccttgcttttcagagtaggg

SEQ ID NO: 4614 - DNA, 61 bp, Homo sapiens
attcctttttatacctttcattttttttagtgatccaaataggaaactttttcattcattg

SEQ ID NO: 4615 - DNA, 61 bp, Homo sapiens
ttcagaagccaaggacagcttagggaaatagcaaagggctaagcataaaatctcagaattc

SEQ ID NO: 4616 - DNA, 61 bp, Homo sapiens
cctccagctccaacattcatcatctttctcggctgctgtgattcagtgggaacactgcaga

SEQ ID NO: 4617 - DNA, 61 bp, Homo sapiens
aaggatgatattcctgagaagacaagtcaacaaacgtagcctgtgtgcattcagtttacat

SEQ ID NO: 4618 - DNA, 61 bp, Homo sapiens
acctaatacatccactcttgtcgttttccaggaggcagaggaacctcgcctgcttcaccat

SEQ ID NO: 4619 - DNA, 61 bp, Homo sapiens
cacaggtcaggatctataccatgtgggctgtgcctgtttcctccaagagtttccagatcgt

SEQ ID NO: 4620 - DNA, 61 bp, Homo sapiens
ttgaatccaggaggcggaggttgcagtgagccgagatcatgccactgcacttcagcctggg

SEQ ID NO: 4621 - DNA, 61 bp, Homo sapiens
gcagaaatttgggcaagaaatggagaagaagacaccagactgtggtgggcatgtgggaaac

SEQ ID NO: 4622 - DNA, 61 bp, Homo sapiens
taaaattatctcatataatcctcctaatagtcctgtaagtaggtattattcttattctcaa

SEQ ID NO: 4623 - DNA, 61 bp, Homo sapiens
taatcttttagagcattcctagctggaaacttttcccggaaatccataagttaagtgctcc

SEQ ID NO: 4624 - DNA, 61 bp, Homo sapiens
tgatgagatgtttttaccccaaatccagccgtgtctttccctgttgtttaggattattaga

SEQ ID NO: 4625 - DNA, 61 bp, Homo sapiens
actgatttagagtgatcaacctatgtccccagagtaagttacagaaactaaatttttaaaa

SEQ ID NO: 4626 - DNA, 61 bp, Homo sapiens
catgcatgcactgttttttttttcctactgtttttttttttccttctgctttcttccctgc

SEQ ID NO: 4627 - DNA, 61 bp, Homo sapiens
atgctgttttgcagatcacattttgagtggcaagactgtggaaaatccttgagaaatcaat

SEQ ID NO: 4628 - DNA, 61 bp, Homo sapiens
gaaaaggcaggcctggtgtcagctgggctgcagatgccagctctcccaccaacaggcccag

SEQ ID NO: 4629 - DNA, 61 bp, Homo sapiens
cccagcacaggcatcccttcctgccagctatgagcctcgaggttagctctactccccctcc

SEQ ID NO: 4630 - DNA, 61 bp, Homo sapiens
ccagctatgagcctcgaggttagctctactccccctccctaaccctgcatgcccaaggggt

SEQ ID NO: 4631 - DNA, 61 bp, Homo sapiens
cctcctctccactagcttgatcactccccatgcaggccctcagttgctttatgctctcagt

SEQ ID NO: 4632 - DNA, 64 bp, Homo sapiens
gccctcagttgctttatgctctcagtaggccattcctcctccagtgcccacactctctcccttc

SEQ ID NO: 4633 - DNA, 61 bp, Homo sapiens
ctcagttgctttatgctctcagtaggccctcctccagtgcccacactctctcccttctcct

SEQ ID NO: 4634 - DNA, 61 bp, Homo sapiens
ccccagggctagcagtgccaagtaactgacaggtgattaatagatgcttgggtaagtatca

SEQ ID NO: 4635 - DNA, 61 bp, Homo sapiens
caggtggggtgggggtggagggattagagattgaggagctggggagggtggtcagctcctg

SEQ ID NO: 4636 - DNA, 61 bp, Homo sapiens
ctaggcctttcaggagtttggggctctggcggagagggcctgctgggagcacatctggcca

SEQ ID NO: 4637 - DNA, 61 bp, Homo sapiens
ccattttacaggaggtgaaactgcagcttagtgaggtagagagtgacttagttcagacaca

SEQ ID NO: 4638 - DNA, 61 bp, Homo sapiens
ctgctgccacaaggacagcagcagtggaaacattcagcaaaggaatgttggagccacatcc

SEQ ID NO: 4639 - DNA, 61 bp, Homo sapiens
cttctgggattctgtaacaataaataggaccgggggctggagtatggccagcaaggactct

SEQ ID NO: 4640 - DNA, 61 bp, Homo sapiens
tggtcccttctccagccttcacttctcttgtccctagatccttacatggattcattaatgc

SEQ ID NO: 4641 - DNA, 61 bp, Homo sapiens
ctgtaatcccagctactcaggaggctgaggcgggagaattgcttgaacccaggaggcagag

SEQ ID NO: 4642 - DNA, 61 bp, Homo sapiens
ctggtaagctgaggaggtctgtccacttccttttgctgcccccagggggtatcaagcctgg

SEQ ID NO: 4643 - DNA, 61 bp, Homo sapiens
cttgggaactgaggagacacagtcagcctccaggagtgcccaaaatgccctcacatgctgc

SEQ ID NO: 4644 - DNA, 61 bp, Homo sapiens
ctgtagtggttgaggcctttgttggtagacagtaggttaaagcaagccatgattttctatt

SEQ ID NO: 4645 - DNA, 61 bp, Homo sapiens
caggcaagcagtccatgggccatgtcagatgtctagacgttatgggtctgtgtttgctctg

SEQ ID NO: 4646 - DNA, 61 bp, Homo sapiens
cagtccatgggccatgtcagatgtctagacgttatgggtctgtgtttgctctgccattcct

SEQ ID NO: 4647 - DNA, 61 bp, Homo sapiens
aacccttacagctttctttctgattctatcctgagttactctactccaagctgagactttt

SEQ ID NO: 4648 - DNA, 61 bp, Homo sapiens
tgaggccacttgagctgttcagctcccttgcggtattttggggatggaactcagaagccaa

SEQ ID NO: 4649 - DNA, 61 bp, Homo sapiens
taacactattcctccaactctgcttcagcatctccatggattttcacacagacactttagg

SEQ ID NO: 4650 - DNA, 61 bp, Homo sapiens; identical to SEQ ID NO: 4573

SEQ ID NO: 4651 - DNA, 61 bp, Homo sapiens
ctgaagataaaattgtgagtcaatcaagatgagtcccaagacaatagcctgtttagccctt

SEQ ID NO: 4652 - DNA, 60 bp, Homo sapiens
agaggaaggaaggaggaggaagcaaacaggaaaaaaaaagaatgtgcatagcttgtcact

SEQ ID NO: 4653 - DNA, 61 bp, Homo sapiens
taccacactggtggagtagactccaactgtggcctgtccatgcccttcccagcaggcacag

SEQ ID NO: 4654 - DNA, 61 bp, Homo sapiens
ttgaatctgtgggtgaagaacccacagatacgaagggccaactgtattggctattttttta

SEQ ID NO: 4655 - DNA, 61 bp, Homo sapiens
ttccttgcctcccctggaaaggtcagtggtgtgtggctgcagcagcacagtgtcctctgag

SEQ ID NO: 4656 - DNA, 61 bp, Homo sapiens
ggtcagtggtgtgtggctgcagcagcacagtgtcctctgagccctggacctgcactgtggc

SEQ ID NO: 4657 - DNA, 61 bp, Homo sapiens
actgtggcttccagaggtggcagttcccacatggggtactagaataaatggcctatcaggc

SEQ ID NO: 4658 - DNA, 61 bp, Homo sapiens
cgcaggtgtggatggctgttagctgggagcctcgctgtctaagctcctctcccatgctttt

SEQ ID NO: 4659 - DNA, 61 bp, Homo sapiens
tccttccctcttctgaccctccattttgccgatctttccttcttataacacatacttacta

SEQ ID NO: 4660 - DNA, 61 bp, Homo sapiens
gaggggagagtaatagcaaaggctcagggcaggaagggcaagggagaggccagtgggtgag

SEQ ID NO: 4661 - DNA, 61 bp, Homo sapiens
ggaagaatgaatagaatcagagaagcaaagtaagagggaagagcagagaggacagcaggga

SEQ ID NO: 4662 - DNA, 61 bp, Homo sapiens
tcctgctgctgcctcatttgtgcagctagattgagcccaagacctgctctggtccaagatg

SEQ ID NO: 4663 - DNA, 61 bp, Homo sapiens
gcttcactattcttctctgtggctaggggatttatggataaaccaaaattacagttaaaaa

SEQ ID NO: 4664 - DNA, 61 bp, Homo sapiens
acagtgactcacgcctttaatatcagcactttgggaggacaaggtgggcggatcacctgag

SEQ ID NO: 4665 - DNA, 61 bp, Homo sapiens
ctgggtgacacagcgacactccgtctcaagaaaaaaaaaaaaaaaaacagttatagtagtc

SEQ ID NO: 4666 - DNA, 61 bp, Homo sapiens
cacagcacaaaatggggaatgagggcgggcattgggacacacatagccttaaggggcccaa

SEQ ID NO: 4667 - DNA, 61 bp, Homo sapiens
ggcgggcattgggacacacatagccttaaggggcccaaaggcttttagaactgtattccct

SEQ ID NO: 4668 - DNA, 61 bp, Homo sapiens
gaactgtattccctattaaaacatgatttgcacagagcacattctttgctttggagacctc

SEQ ID NO: 4669 - DNA, 61 bp, Homo sapiens
cctccttgactggtccttgcatttgcctccatccagcctgtctgggctctccgaggcaatg

SEQ ID NO: 4670 - DNA, 61 bp, Homo sapiens
tgctgaagccatcgttgcggggctgtctgtagagaccctggagggcacgacactggaggtg

SEQ ID NO: 4671 - DNA, 61 bp, Homo sapiens
cagaggctgatctctgcctaactgagctcacctctcctccctctcctcctgactggttaga

SEQ ID NO: 4672 - DNA, 61 bp, Homo sapiens
gatctctgcctaactgagctcacctctcctccctctcctcctgactggttagattttctag

SEQ ID NO: 4673 - DNA, 61 bp, Homo sapiens
gctctgaacaaatcaggaggcccctcgtggaagtataaccagtcctttctttctctgtccc

SEQ ID NO: 4674 - DNA, 61 bp, Homo sapiens
ctttctctgtccctcttctgtgcagagcctctgcattgagaacagctgcatcgcggcccac

SEQ ID NO: 4675 - DNA, 61 bp, Homo sapiens
cctcaaccgggaaggagtctacacagtctttgctcccacaaatgaagccttccgagccctg

SEQ ID NO: 4676 - DNA, 61 bp, Homo sapiens
ggaggatgagagcaggaaccagggaggtcatgagccttggacaagggcacagaacagcagc

SEQ ID NO: 4677 - DNA, 61 bp, Homo sapiens
gaggatgtttggcaggggatctagtggttacgggtggctaagaaaaatgaggaaggtaaga

SEQ ID NO: 4678 - DNA, 61 bp, Homo sapiens
gagtatcttgcagcctgtgttgggaggattaaataggatgccacacacagggccaggcaga

SEQ ID NO: 4679 - DNA, 61 bp, Homo sapiens
agctccagaaatctccctggctgcacctgcagaggccactgacccctctgtggagggaccg

SEQ ID NO: 4680 - DNA, 61 bp, Homo sapiens
tgactttagcaggtcattcaagaatctcctcgcacctggtttcagatgctggggtcctgtc

SEQ ID NO: 4681 - DNA, 61 bp, Homo sapiens
tgcccagagcaggaagcctgtcttccatttccagctgttccacctacttagcttaaaagag

SEQ ID NO: 4682 - DNA, 61 bp, Homo sapiens
gcccagagcaggaagcctgtcttccatttccagctgttccacctacttagcttaaaagagg

SEQ ID NO: 4683 - DNA, 61 bp, Homo sapiens
tccacctacttagcttaaaagaggcacttcgcctgtcttcagtctcagtctcagtctcctc

SEQ ID NO: 4684 - DNA, 61 bp, Homo sapiens
ctgtttcattcaccagagtatccccagtctaacacaggacttggcatatgaaaagtgttca

SEQ ID NO: 4685 - DNA, 61 bp, Homo sapiens
ggtggcacatgcctgtaatcacagctactctggaggctgaggcaggagaatcacttgaacc

SEQ ID NO: 4686 - DNA, 61 bp, Homo sapiens
aacgaaaactgttcagtaaacacttgctgaatgaataaaataaatatataaatgtataaat

SEQ ID NO: 4687 - DNA, 61 bp, Homo sapiens
taaacacttgctgaatgaataaaataaatatataaatgtataaataaatgctctactttca

SEQ ID NO: 4688 - DNA, 61 bp, Homo sapiens
ccccactgactctgcagccagtccttttcttcatgtggcagttggtggagagaagaaaaac

SEQ ID NO: 4689 - DNA, 61 bp, Homo sapiens
ggtgaggctggggctctcctgggcactgtatgtattctggatacagggatactgggctcgc

SEQ ID NO: 4690 - DNA, 61 bp, Homo sapiens
ccttgccccagccccacctccctctcaaaccctctctggctctttctgagcttcctttcct

SEQ ID NO: 4691 - DNA, 61 bp, Homo sapiens
cccatcccctctgtgccaacccacattcagattccttccccggctcccgtaatctctggca

SEQ ID NO: 4692 - DNA, 61 bp, Homo sapiens
acattcagattccttccccggctcccgtaatctctggcatctagaatatcctcaggactct

SEQ ID NO: 4693 - DNA, 61 bp, Homo sapiens
ggctggcccactttcctagagaatgggacagacctccttcccacccacacccatctctgcc

SEQ ID NO: 4694 - DNA, 61 bp, Homo sapiens
tacacacactgcactttaccaagatgacctcggaaaccaaagaggtgatcagcataagttt

SEQ ID NO: 4695 - DNA, 61 bp, Homo sapiens
ggaagaaggggaatgggctcttcttagtccacttctgtctttgctgtcactctgggaatac

SEQ ID NO: 4696 - DNA, 61 bp, Homo sapiens
gccctaacagtccctgcagtgctggagctccccatcacttggggaggcgatggaggtcact

SEQ ID NO: 4697 - DNA, 61 bp, Homo sapiens
tttgaggctgaataatattccattgcatatatataccactcactttgtttattcactcatc

SEQ ID NO: 4698 - DNA, 61 bp, Homo sapiens
ttaatttgggaggggggggaattgctatagtgtttccattgtggctgcactatgtcacatt

SEQ ID NO: 4699 - DNA, 61 bp, Homo sapiens
agttgctccacatcctctctaatacttgttattttctggtttttggtaataaccattctat

SEQ ID NO: 4700 - DNA, 61 bp, Homo sapiens
tttactctgttgacagtgtcctttgatgcataaacatctttaatttagatgaagttcacaa

SEQ ID NO: 4701 - DNA, 61 bp, Homo sapiens
accacactgttttgattattgtagccttggcgtaagttttaaaattagtaagtatgagtcc

SEQ ID NO: 4702 - DNA, 61 bp, Homo sapiens
gtaagtatgagtccttcaactttgttcttctttttcaaaattgttgtggctattggaaatt

SEQ ID NO: 4703 - DNA, 60 bp, Homo sapiens
aaaattcagagcagggaagaagctactggtaaaaaaaaaaaaaaagactaagagtctcct

SEQ ID NO: 4704 - DNA, 61 bp, Homo sapiens
gactccctaactgagaaaggtcacccctgggtcagcaggccccaactcagagagaacatct

SEQ ID NO: 4705 - DNA, 61 bp, Homo sapiens
ggtaaatggctgatgagtcacactgcagaaaggctgcttcatctttagcaggtgactccac

SEQ ID NO: 4706 - DNA, 61 bp, Homo sapiens
tctcctgtcagtggggcgggtgagtccctgcggcttcttggcaacagcttatgaataattc

SEQ ID NO: 4707 - DNA, 61 bp, Homo sapiens
ggcttcctcccgtgacatgtggggattatggtaactacaattcaagatgagatttgggtgg

SEQ ID NO: 4708 - DNA, 61 bp, Homo sapiens
cttcaaagcatcaagcttagacattgcacacagtaggtcatgcataagcatagaacaagta

SEQ ID NO: 4709 - DNA, 61 bp, Homo sapiens
aaattcaacttgaatttcatttcctctaagatggaaattcagggtcttaatgaattaattt

SEQ ID NO: 4710 - DNA, 61 bp, Homo sapiens
tacaaagttgctggtttgaagaaagaggggcatgagaaaaaagaatgcaggcagcctcagg

SEQ ID NO: 4711 - DNA, 61 bp, Homo sapiens
ctggattctccactaacctaaattagttcggagagggagtctcctctcgctcctccagaga

SEQ ID NO: 4712 - DNA, 61 bp, Homo sapiens
ctcccagctcagtgtttctcaaacttgttcagatgaagattctgactcgagaggtctggga

SEQ ID NO: 4713 - DNA, 61 bp, Homo sapiens
ttctttgctcaaaggcaaaactctgtttccccagggggcccagtcaggttgagcagtaaga

SEQ ID NO: 4714 - DNA, 61 bp, Homo sapiens
atgtctataccatccccaggagagctagaggaaagaagagccttttgactctgaatgtcct

SEQ ID NO: 4715 - DNA, 61 bp, Homo sapiens
aaggaacaagagagctggacctcgggattgggggcagaagtggtcccttctgctttctcgg

SEQ ID NO: 4716 - DNA, 61 bp, Homo sapiens
agagttccctttgagcaggaagaggagagtgctttctccatttcatcttctgccaaataca

SEQ ID NO: 4717 - DNA, 61 bp, Homo sapiens
aatagtcacactagtgttctttaaaaacgcgggttcctgcgcaccacccggtgattctgat

SEQ ID NO: 4718 - DNA, 61 bp, Homo sapiens
tctgattcagctgtctggggtgggtcggggaaggaagctgaagtttttaaaagaccctcag

SEQ ID NO: 4719 - DNA, 61 bp, Homo sapiens
ggaggtgctcgctcctgatgttcgctgttcccaaacccctataaggatccttcagtccaac

SEQ ID NO: 4720 - DNA, 61 bp, Homo sapiens
ttcccaaacccctataaggatccttcagtccaacctcttgggtggggaacagagggggtcc

SEQ ID NO: 4721 - DNA, 61 bp, Homo sapiens
cgggcataggaggggaggtgcacactggagaggaggcgcgcgggaccggaggcgcacaccg

SEQ ID NO: 4722 - DNA, 61 bp, Homo sapiens
caagaagacgattctggattgtaggccgcccgagagcgcccccaggagcccatcactgcga

SEQ ID NO: 4723 - DNA, 61 bp, Homo sapiens
tgcgaacaggtgagaatagcgtaggtacaggccgccagggaggaagaaacttggaactttc

SEQ ID NO: 4724 - DNA, 61 bp, Homo sapiens
ggtgcgggggggcgtgtgggccgtctacctaggtccagcagccaggctgctgaggagtacc

SEQ ID NO: 4725 - DNA, 61 bp, Homo sapiens
ttaacaaaaagtgacatattcaggaacagaaccaaagtttgaactctcaagaaagagttgc

SEQ ID NO: 4726 - DNA, 61 bp, Homo sapiens
ccctgttagggctagacattgaaggtttttttgtttgtttgtttttttccatgagtttacc

SEQ ID NO: 4727 - DNA, 61 bp, Homo sapiens
cctctctcctctccacacactctccttactctttgttgcatcaccctacgtctttccacca

SEQ ID NO: 4728 - DNA, 61 bp, Homo sapiens
cataatcttcaccaaactctgcaaggtagaaccttttatttgctggatgagtaaactgagg

SEQ ID NO: 4729 - DNA, 61 bp, Homo sapiens
gttcaatctcatgcttgtgcaatggtggtacttctcagtggagaaatgtatactggctaaa

SEQ ID NO: 4730 - DNA, 61 bp, Homo sapiens
gtctaaacattgttgagaagaagcagtggcaaaaaaaaaaaaagttgaaaatacattagag

SEQ ID NO: 4731 - DNA, 60 bp, Homo sapiens
attttaacatcaggaatgcctgatttttttaaaaaaaaaacctcccagcaaactaggaat

SEQ ID NO: 4732 - DNA, 61 bp, Homo sapiens
aaaatctttgtaaatggtatacctggtaaacggcttgtatacagaataaaaaataactcaa

SEQ ID NO: 4733 - DNA, 61 bp, Homo sapiens
atagtgagaaaacaaacagctcatttttttccatgggccaaagatgtgaatagacatttca

SEQ ID NO: 4734 - DNA, 60 bp, Homo sapiens
agaagatatatgatagcaaataagcacatgaaaaaaaaaaatctcagcattgttagtctt

SEQ ID NO: 4735 - DNA, 61 bp, Homo sapiens
atactactccacatttattacaatgtttggaacaaaaggccattttaagtgttggcaagga

SEQ ID NO: 4736 - DNA, 61 bp, Homo sapiens
tcatcactttggaagagaaagagtttggcaatttcttaaaaagctaaacatacacctatca

SEQ ID NO: 4737 - DNA, 61 bp, Homo sapiens
aagctaaacatacacctatcacatggtccagccattctataagatatttactcaagggaaa

SEQ ID NO: 4738 - DNA, 61 bp, Homo sapiens
tacacctatcacatggtccagccattctataagatatttactcaagggaaaagaaagcata

SEQ ID NO: 4739 - DNA, 61 bp, Homo sapiens
ccaaactggaaacgactcaaatgttcctaaacagatcaacggataaacaatctgtgttata

SEQ ID NO: 4740 - DNA, 61 bp, Homo sapiens
atgaaaacagtacatactgtattgctccatctatataaaactctaaaaaatgcaagctaat

SEQ ID NO: 4741 - DNA, 61 bp, Homo sapiens
accttgtcctcccccttcatcccatgggatactcctcttcacttcccacaaaatccaacca

SEQ ID NO: 4742 - DNA, 62 bp, Homo sapiens
tggccagtgccagggttgctaaatacttcaatatatcactttcgctggaccccaaagagtaa

SEQ ID NO: 4743 - DNA, 61 bp, Homo sapiens
aattttattgttctattatatatatatatagagagagagagttctatatatatattgttct

SEQ ID NO: 4744 - DNA, 60 bp, Homo sapiens
tgtgtgtgtgtgtgtttgtgtgtgtgtgtgtatatatatatatatgtatatatatggaga

SEQ ID NO: 4745 - DNA, 61 bp, Homo sapiens
tcctggtacagcgagaaacatggtttttacataagaatgataacttggctggacatacaat

SEQ ID NO: 4746 - DNA, 60 bp, Homo sapiens
tcttgaggttctaagtacggtatttttctgaaaaaaaaaaaaaaatggttttactgaaag

SEQ ID NO: 4747 - DNA, 61 bp, Homo sapiens
tctgaccacccaggctagattctgtcctctcattgagatttttcactgtactttatactac

SEQ ID NO: 4748 - DNA, 61 bp, Homo sapiens
aggtaagaaaagtgctttgcctagagcctggtataagttttcaataggcattaagcatatt

SEQ ID NO: 4749 - DNA, 61 bp, Homo sapiens
agaattagttctataccatgtggctcaaaagcagcactttggactgaatgctacaggggcc

SEQ ID NO: 4750 - DNA, 61 bp, Homo sapiens
tataccatgtggctcaaaagcagcactttggactgaatgctacaggggccacacacaaagc

SEQ ID NO: 4751 - DNA, 61 bp, Homo sapiens
ttgtctttgcctgtcacttcccccttccccggctgcaggattcctgtctcacaactaccct

SEQ ID NO: 4752 - DNA, 61 bp, Homo sapiens
catttctggagaaggatggtggtcacggacctgggcttgatctgccgactctctgtgcctc

SEQ ID NO: 4753 - DNA, 61 bp, Homo sapiens
gcagcagcagtgatggggcttttttcctgcgtccaccagccatctgatacacaccccaaag

SEQ ID NO: 4754 - DNA, 61 bp, Homo sapiens
caaagtcctgtattaccttatccccttccttgcccgggctgactttccctgcttacctctg

SEQ ID NO: 4755 - DNA, 60 bp, Homo sapiens
acgagattgatgagggaatttgataaaatagtgtgtgtgtgtgtgtgtgtgtgtgtgtgt

SEQ ID NO: 4756 - DNA, 61 bp, Homo sapiens
agtcttgtccacctgctgggccatggagcagtgtcatggaatctccagggagccttttatt

SEQ ID NO: 4757 - DNA, 61 bp, Homo sapiens
agcagaggggtggttgtctggccacctgaatgcaggggcagcccccttctttttcttccca

SEQ ID NO: 4758 - DNA, 61 bp, Homo sapiens
agaatagggactgcatctgcttgtccatggttgtacaccagttacatgagcaatgcttgtg

SEQ ID NO: 4759 - DNA, 61 bp, Homo sapiens
atgggagtgaatttctttctttctttcttttttttttttgagacagagtctcattctgtca

SEQ ID NO: 4760 - DNA, 61 bp, Homo sapiens
tgatctgcctgcctcggcctcccaaagtgcttaggattacaggtgtgagccaccacacccg

SEQ ID NO: 4761 - DNA, 61 bp, Homo sapiens
ttcacatgggcccttgcaaaaggagcatgtgtttctatgagaggtggggccaaagagattg

SEQ ID NO: 4762 - DNA, 20 bp, Artificial Sequence
  Description of Artificial Sequence: Synthetic oligonucleotide
gatagagggtacacaggcat

SEQ ID NO: 4763 - DNA, 20 bp, Artificial Sequence
  Description of Artificial Sequence: Synthetic oligonucleotide
aaaagcaaggcagtccaacc

SEQ ID NO: 4764 - DNA, 20 bp, Artificial Sequence
  Description of Artificial Sequence: Synthetic oligonucleotide
ccaacattcatcatctttct

SEQ ID NO: 4765 - DNA, 20 bp, Artificial Sequence
  Description of Artificial Sequence: Synthetic oligonucleotide
atccactcttgtcgttttcc

SEQ ID NO: 4766 - DNA, 20 bp, Artificial Sequence
  Description of Artificial Sequence: Synthetic oligonucleotide
ggatctataccatgtgggct

SEQ ID NO: 4767 - DNA, 20 bp, Artificial Sequence
  Description of Artificial Sequence: Synthetic oligonucleotide
aggatctataccatgtgggc

SEQ ID NO: 4768 - DNA, 20 bp, Artificial Sequence
  Description of Artificial Sequence: Synthetic oligonucleotide
ggcatgcagggttagggagg

SEQ ID NO: 4769 - DNA, 20 bp, Artificial Sequence
  Description of Artificial Sequence: Synthetic oligonucleotide
tgtgggcactggaggaggaa

SEQ ID NO: 4770 - DNA, 20 bp, Artificial Sequence
  Description of Artificial Sequence: Synthetic oligonucleotide
tagcagtgccaagtaactga

SEQ ID NO: 4771 - DNA, 20 bp, Artificial Sequence
  Description of Artificial Sequence: Synthetic oligonucleotide
ttgaggcctttgttggtaga

SEQ ID NO: 4772 - DNA, 20 bp, Artificial Sequence
  Description of Artificial Sequence: Synthetic oligonucleotide
agggctgtattactggggct

SEQ ID NO: 4773 - DNA, 20 bp, Artificial Sequence
  Description of Artificial Sequence: Synthetic oligonucleotide
cagggctgtattactggggc

SEQ ID NO: 4774 - DNA, 20 bp, Artificial Sequence
  Description of Artificial Sequence: Synthetic oligonucleotide
tgtgtggctgcagcagcaca

SEQ ID NO: 4775 - DNA, 20 bp, Artificial Sequence
  Description of Artificial Sequence: Synthetic oligonucleotide
gtgtgtggctgcagcagcac

SEQ ID NO: 4776 - DNA, 20 bp, Artificial Sequence
  Description of Artificial Sequence: Synthetic oligonucleotide
ggagaggagcttagacagcg

SEQ ID NO: 4777 - DNA, 20 bp, Artificial Sequence
  Description of Artificial Sequence: Synthetic oligonucleotide
catcgttgcggggctgtctg

SEQ ID NO: 4778 - DNA, 20 bp, Artificial Sequence
  Description of Artificial Sequence: Synthetic oligonucleotide
caaatcaggaggcccctcgt

SEQ ID NO: 4779 - DNA, 20 bp, Artificial Sequence
  Description of Artificial Sequence: Synthetic oligonucleotide
aatctccctggctgcacctg

SEQ ID NO: 4780 - DNA, 20 bp, Artificial Sequence
  Description of Artificial Sequence: Synthetic oligonucleotide
gagactgagactgaagacag

SEQ ID NO: 4781 - DNA, 20 bp, Artificial Sequence
  Description of Artificial Sequence: Synthetic oligonucleotide
tgagactgagactgaagaca

SEQ ID NO: 4782 - DNA, 20 bp, Artificial Sequence
  Description of Artificial Sequence: Synthetic oligonucleotide
tgcctgtaatcacagctact

SEQ ID NO: 4783 - DNA, 20 bp, Artificial Sequence
  Description of Artificial Sequence: Synthetic oligonucleotide
tctctccaccaactgccaca

SEQ ID NO: 4784 - DNA, 20 bp, Artificial Sequence
  Description of Artificial Sequence: Synthetic oligonucleotide
catcgcctccccaagtgatg

SEQ ID NO: 4785 - DNA, 20 bp, Artificial Sequence
  Description of Artificial Sequence: Synthetic oligonucleotide
ccatcgcctccccaagtgat

SEQ ID NO: 4786 - DNA, 20 bp, Artificial Sequence
  Description of Artificial Sequence: Synthetic oligonucleotide
aactgagaaaggtcacccct

SEQ ID NO: 4787 - DNA, 20 bp, Artificial Sequence
  Description of Artificial Sequence: Synthetic oligonucleotide
cccgtgacatgtggggatta

SEQ ID NO: 4788 - DNA, 20 bp, Artificial Sequence
  Description of Artificial Sequence: Synthetic oligonucleotide
tccactaacctaaattagtt

SEQ ID NO: 4789 - DNA, 20 bp, Artificial Sequence
  Description of Artificial Sequence: Synthetic oligonucleotide
cagtgtttctcaaacttgtt

SEQ ID NO: 4790 - DNA, 20 bp, Artificial Sequence
  Description of Artificial Sequence: Synthetic oligonucleotide
gagagctggacctcgggatt

SEQ ID NO: 4791 - DNA, 20 bp, Artificial Sequence
  Description of Artificial Sequence: Synthetic oligonucleotide
agagagctggacctcgggat

SEQ ID NO: 4792 - DNA, 20 bp, Artificial Sequence
  Description of Artificial Sequence: Synthetic oligonucleotide
actagtgttctttaaaaacg

SEQ ID NO: 4793 - DNA, 20 bp, Artificial Sequence
  Description of Artificial Sequence: Synthetic oligonucleotide
gaggggaggtgcacactgga

SEQ ID NO: 4794 - DNA, 20 bp, Artificial Sequence
  Description of Artificial Sequence: Synthetic oligonucleotide
ggaggggaggtgcacactgg

SEQ ID NO: 4795 - DNA, 20 bp, Artificial Sequence
  Description of Artificial Sequence: Synthetic oligonucleotide
ggtgagaatagcgtaggtac

SEQ ID NO: 4796 - DNA, 20 bp, Artificial Sequence
  Description of Artificial Sequence: Synthetic oligonucleotide
ctattcacatctttggccca

SEQ ID NO: 4797 - DNA, 20 bp, Artificial Sequence
  Description of Artificial Sequence: Synthetic oligonucleotide
gagactgagactgaagacag

SEQ ID NO: 4798 - DNA, 20 bp, Artificial Sequence
  Description of Artificial Sequence: Synthetic oligonucleotide
tgcctgtaatcacagctact

SEQ ID NO: 4799 - DNA, 20 bp, Artificial Sequence
  Description of Artificial Sequence: Synthetic oligonucleotide
tcacaacgttgagtatacag

SEQ ID NO: 4800 - DNA, 20 bp, Artificial Sequence
  Description of Artificial Sequence: Synthetic oligonucleotide
agggctgtattactggggct

SEQ ID NO: 4801 - DNA, 20 bp, Artificial Sequence
  Description of Artificial Sequence: Synthetic oligonucleotide
caccaacaggcaaggcccgg

SEQ ID NO: 4802 - DNA, 20 bp, Artificial Sequence
  Description of Artificial Sequence: Synthetic oligonucleotide
agaagttggtaacgtcaaat

SEQ ID NO: 4803 - DNA, 20 bp, Artificial Sequence
  Description of Artificial Sequence: Synthetic oligonucleotide
caaatcaggaggcccctcgt

SEQ ID NO: 4804 - DNA, 20 bp, Artificial Sequence
  Description of Artificial Sequence: Synthetic oligonucleotide
tagcagtgccaagtaactga

SEQ ID NO: 4805 - DNA, 20 bp, Artificial Sequence
  Description of Artificial Sequence: Synthetic oligonucleotide
agggctgtattactggggct

SEQ ID NO: 4806 - DNA, 20 bp, Artificial Sequence
  Description of Artificial Sequence: Synthetic oligonucleotide
tagcagtgccaagtaactga

SEQ ID NO: 4807 - DNA, 20 bp, Artificial Sequence
  Description of Artificial Sequence: Synthetic oligonucleotide
ggatctataccatgtgggct

SEQ ID NO: 4808 - DNA, 20 bp, Artificial Sequence
  Description of Artificial Sequence: Synthetic oligonucleotide
tgcctgtaatcacagctact

SEQ ID NO: 4809 - DNA, 20 bp, Artificial Sequence
  Description of Artificial Sequence: Synthetic oligonucleotide
cccagttttctgtattcgcg

SEQ ID NO: 4810 - DNA, 20 bp, Artificial Sequence
  Description of Artificial Sequence: Synthetic oligonucleotide
gagactgagactgaagacag

SEQ ID NO: 4811 - DNA, 20 bp, Artificial Sequence
  Description of Artificial Sequence: Synthetic oligonucleotide
caccaacaggcaaggcccgg

SEQ ID NO: 4812 - DNA, 20 bp, Artificial Sequence
  Description of Artificial Sequence: Synthetic oligonucleotide
tcagctgtacacggaccaca

SEQ ID NO: 4813 - DNA, 20 bp, Artificial Sequence
  Description of Artificial Sequence: Synthetic oligonucleotide
catcgcctccccaagtgatg

SEQ ID NO: 4814 - DNA, 20 bp, Artificial Sequence
  Description of Artificial Sequence: Synthetic oligonucleotide
gagactgagactgaagacag

SEQ ID NO: 4815 - DNA, 20 bp, Artificial Sequence
  Description of Artificial Sequence: Synthetic oligonucleotide
agggctgtattactggggct

SEQ ID NO: 4816 - DNA, 20 bp, Artificial Sequence
  Description of Artificial Sequence: Synthetic oligonucleotide
gagactgagactgaagacag

SEQ ID NO: 4817 - DNA, 20 bp, Artificial Sequence
  Description of Artificial Sequence: Synthetic oligonucleotide
catcgcctccccaagtgatg

SEQ ID NO: 4818 - DNA, 20 bp, Artificial Sequence
  Description of Artificial Sequence: Synthetic oligonucleotide
cccgtgacatgtggggatta

SEQ ID NO: 4819 - DNA, 20 bp, Artificial Sequence
  Description of Artificial Sequence: Synthetic oligonucleotide
caccaacaggcaaggcccgg

SEQ ID NO: 4820 - DNA, 20 bp, Artificial Sequence
  Description of Artificial Sequence: Synthetic oligonucleotide
tcacaacgttgagtatacag

SEQ ID NO: 4821 - DNA, 20 bp, Artificial Sequence
  Description of Artificial Sequence: Synthetic oligonucleotide
cccagttttctgtattcgcg

SEQ ID NO: 4822 - DNA, 20 bp, Artificial Sequence
  Description of Artificial Sequence: Synthetic oligonucleotide
agaagttggtaacgtcaaat

SEQ ID NO: 4823 - DNA, 20 bp, Artificial Sequence
  Description of Artificial Sequence: Synthetic oligonucleotide
tgcctgtaatcacagctact

SEQ ID NO: 4824 - DNA, 20 bp, Artificial Sequence
  Description of Artificial Sequence: Synthetic oligonucleotide
tcacaacgttgagtatacag

SEQ ID NO: 4825 - DNA, 20 bp, Artificial Sequence
  Description of Artificial Sequence: Synthetic oligonucleotide
agggctgtattactggggct

SEQ ID NO: 4826 - DNA, 20 bp, Artificial Sequence
  Description of Artificial Sequence: Synthetic oligonucleotide
caccaacaggcaaggcccgg

SEQ ID NO: 4827 - DNA, 20 bp, Artificial Sequence
  Description of Artificial Sequence: Synthetic oligonucleotide
agaagttggtaacgtcaaat

SEQ ID NO: 4828 - DNA, 20 bp, Artificial Sequence
  Description of Artificial Sequence: Synthetic oligonucleotide
cccagttttctgtattcgcg

SEQ ID NO: 4829 - DNA, 20 bp, Artificial Sequence
  Description of Artificial Sequence: Synthetic oligonucleotide
gagactgagactgaagacag

SEQ ID NO: 4830 - DNA, 20 bp, Artificial Sequence
  Description of Artificial Sequence: Synthetic oligonucleotide
caccaacaggcaaggcccgg

SEQ ID NO: 4831 - DNA, 20 bp, Artificial Sequence
  Description of Artificial Sequence: Synthetic oligonucleotide
tcagctgtacacggaccaca

SEQ ID NO: 4832 - DNA, 20 bp, Artificial Sequence
  Description of Artificial Sequence: Synthetic oligonucleotide
catcgcctccccaagtgatg
